United States Patent Application Publication US 2003/0073623 A1 - sequence listing, part 7

SEQ ID NO: 34113 - DNA, 436 bp, Homo sapiens
ggtttttcacagtacaagacagagaaatctactttaatattcacatgtaaaagttacacatcacaagagattggacagtagcttagcgtaacatagctatagtgaaaatcatttttataaaaaaataatctagatgcgggcatcagaatttttggtctgcttaagttaatgtttgaagatcgacttttatccctgcttgaaggatttgccattatgccttttttttctcccactgttgcctattaattctttggaggaaggaaagcagaaagtgttcatttccaagagtttgtcctttggtagcaagcagagaacatttttttcatttccatgatttaaataatctggacagacatgaaacttagtgacattaagctttagtgtaaaatgaagagtaataagcaattttttttcactttgataaaacagcagattt

SEQ ID NO: 34114 - DNA, 381 bp, Homo sapiens
  misc_feature (1)...(381): n = A,T,C or G
gggccatctccttcctggtcctagccgtgggcttcagcggcttcgccatctctgggttcaacgtgaaccacctggacatagccccgcgctacgccagcatcctcatgggcatctccaacggcgtgggcacactgtcgggcatggtgtgccccatcatcgtgggggccatgactaagcacaagactcgggaggagtggcagtacgtgttcctaattgcctccctggtgcactatggaggtgtcatcttctacggggtctttgcttctggagagaagcagccgtgggcagagcctgaggagatgagcgaggagaagtgtggcttctttggccatgaccagctggctggcagtgacgacagcgaaatggaggatgaggctgacn

SEQ ID NO: 34115 - DNA, 395 bp, Homo sapiens
gagctgtgactgcctgcagggcttccagctgacccactcactgggcgggggcacaggctctggaatgggcactctccttatcagcaagatccgagaagaataccctgatcgcatcatgaataccttcagtgtggtgccttcacccaaagtgtctgacaccgtggtcgagccctacaatgccaccctctccgtccatcagttggtagagaatactgatgagacctattgcattgacaacgaggccctctatgatatctgcttccgcactctgaagctgaccacaccaacctacggggatctgaaccaccttgtctcagccaccatgagtggtgtcaccacctgcctccgtttccctggccagctcaatgctgacctccgcaagttggcagtcaaca

SEQ ID NO: 34116 - DNA, 446 bp, Homo sapiens
  misc_feature (1)...(446): n = A,T,C or G
ggcaaacagctcggtttttagaccctgtgcattttctccaatagacttaaccttttgcaaaatgagagaagtgcccagttatgtaggggacaggagtgtgcaaagaaggctgagcaagaaaaagctttggaggaggatgccatcagagtgccatcagacttgggactacatcagctaaaatacattattgtcactcccaaactgctggaagccagtccttccagcaagctcagaagcttataggtttaggggcacagagggaaaggccatttcccaagtattcatcagtggagaaattgggcttctcttagcatcatctggacttggagccttcagagcaaattgcttactccttcagtactttgttgtagagcccattagagtgtagtggaaaaagaactccacaagagcacaccaggagtgtgagaagggccagatagtgattn

SEQ ID NO: 34117 - DNA, 418 bp, Homo sapiens
ggctcaatttttcaactagatttgtaatttggcacagtaatgaaatcttaagcccatgcacctattctgggcttcttgtttgtttgttttgagacggagtctagctgcatgcagctggaatggagtggcacaatcttggctcactgcaacctctgcctcccgggttcaggcggttctcttgcctcagcctcccgaatagctgggattgcgggcacacaccgccatgcccagctaatttttgtatttttagtaaagatggggtttcgccgtgttggccaggctggtctccaactcctgacctcaagtgatccgcctgcctcggcctcccaaagtgctgggattacaggcgtgagccactgtgccttgccacctattctgttttgaacttcattttcctaacaacatcctgaattactga

SEQ ID NO: 34118 - DNA, 415 bp, Homo sapiens
  misc_feature (1)...(415): n = A,T,C or G
ggggatcctgtgattggaaatttttgttttccatgcaggttctaggctaatgctttgcatgtgtgggtactcaatgcaaaggtacatgttttaagtgaaaggacccaaaattcatgacttgctgtacaaatgatgatcaggccttaggagaggagatttagaccagaaatctacgtgttgctttgagttattattattacttaaattatcctatatttttaggttaaaaactcattgagcaaatcattatcttgatgagaaatcaagagtcaggttaagtaaatttattttggttagaaggctctctaccatcaactgaagagttaaaccaagggctctcccatgtgaaaacatatattgcttcagcttatcatgattgcgtagattatctacaagattatgtctatttaaatgn

SEQ ID NO: 34119 - DNA, 419 bp, Homo sapiens
atagtaaaaaattgaaagacctaattactacgttacatggacctattgaattttgggggaacgtgttagtaaacccagactagctttgttgaatagaagttgatcgctgttatttaggaaatgggtagatcaaatgacttagagactgaattatcctatcagtggttacatggggttggagacactgaaaggcagtgatcactgttgcttctaggctcccttactttgtaggaatatggtatactttcaggaatatgctatatatgttttcataagtacagacaccttagggaagaaaaaaagtgggtaattgaagcttatggttgattaatttcctaacagcacagctatgaatattttgctggggtacactggaggtaggaagactactggaaatttttgcacttgaattttgtttt

SEQ ID NO: 34120 - DNA, 445 bp, Homo sapiens
ttccctttgtaaccgtttgaccatttgacgccctgcttggcaccagggcgtcctcttcctcctcatctgaagggagtacctcctccatttcttctaactcagccttttctatcacatcctcctttacttcaggttcactttcctctctggcttctgttctgtctgggagcctctctgcttccctctgcttcttttcctcccaggtatctttctcttcctctgtttcagccccagagtctaggcctctgtccttgctgccttgttcctcagggacctctgggacaagctctttctccttcatcacatgttcttcttgtcccagccctggaacagagggtggggttccctggatagctgtacttgggggtccctcctctgcagtgtctagagggaatggcttatctcctagtcctgtgtccctttgttcagccagcaaagccctctc

SEQ ID NO: 34121 - DNA, 445 bp, Homo sapiens
  misc_feature (1)...(445): n = A,T,C or G
ctagacgccctcctnnntatgaatatctncgaaccncannancgccagcttggnacgaggcaggggatgagttttatcatccactctgggcagtcggccctttggggaggccttgcccaccttggtgaggctcctgtggcccctccctccccctcctcccctcttttactctagacgacgaataaagccctgttagaggatgcggctctctctgtccccttcctgtcctgccttcctgggtctcgtaccacacaccagaccctaaaccgcaggctgctgtgtgtggctgagaaggacccaggagtccaaatcccgtgtcctgggactcagcatccagcatgggtgcttggagccgttgtgaggagctctgcgtcctgtggggagcacccttcacgtggccgtgcggcacagagaagcagggcccacctgaaagtgcgccgagact

SEQ ID NO: 34122 - DNA, 427 bp, Homo sapiens
ggccagaagcatgtcagggagacggacaggtgctctccttctcgtgcaccacatccaagtccacccaccgtggacgcagtgtgactaaatgctggccttgaagagaaaccctcagccagcttgtctgttgtccaggtccctcagtgtctctggtttccctgccctgcataatttaagcattagtgccaaatacatctggcatattcctctccctggagactgcgaaatgtccagactttttcagactagtggagggaaggaatgttacataactaagtggaggcctggaactgtcaggatttgacagggctggaccagagacccttccgcctctgcctagtgtgtctgtcaggcaggcagcagccatcaatccaagaatgagccatggcggcaagcactgtgtggagaaaggaacccagccgaggtg

SEQ ID NO: 34123 - DNA, 496 bp, Homo sapiens
  misc_feature (1)...(496): n = A,T,C or G
nttagaaaaccgctatgaccatgtagaagcacagcttggaacgaggaaaaatttattttttgccttttatttgagatgaggtagaaggctttcacgtattatggattcacattctttgttgaatatatgcattatgaatattttctcctagtttgtgacttggctattaattttcttaagcccttcaatgagcaggcatttttaaattttgggaggctaacttaacttttttattcttttataatcattgctttttgtgtcttacctaaaaaaatctttgcctgtaccaagatattcttggatgttttcttctacaaatttcatagttttaacttttacatgtaggattatgatgtatctgaaattaatttttgtgtacagtatgaagtaaaggttaaaatttatttcatttttatatatttacacagttggtacagaaagttgcagaaaatatttacttttcctcatcaaattgctgcgaatgacctttattgaa

SEQ ID NO: 34124 - DNA, 438 bp, Homo sapiens
  misc_feature (1)...(438): n = A,T,C or G
ggcggcgagatggaggggtgtgcatggaccttggagggggaggaggaggaggaagaggagtacgaggatgacgaggaggagggggaagaccaggaggaggaggaggctgcggcaaaagctgccgcgggggccaaacatgacgatgcccacgccgagatgcctgatgacgccaagaagtaaggggggcagagatggatgaagagaaagcccacgaagaaaaaagcctggttttgtttttcccagaatatcgatggacttaaaaaggctcaggtttttgaccaaaatacaatgtgaatttattctgacattcctaaaatagattaaattaaagcaattagatcctggccagctcgattcaaatttgactttcattttgaacataataaatatatcaaaaggtgttaaagaanactggaataaacccannaatattgttta

SEQ ID NO: 34125 - DNA, 397 bp, Homo sapiens
  misc_feature (1)...(397): n = A,T,C or G
ggctactttccccactcccaaacaatgatacatcttctccaagcattggatgtggccaatcggctagaagtgattcctaaaatttggaaagatagtaaagaatatggtcatactttccgcagtgacctgagagaagagatcctgatgctcatggcaagggacaagcacccaccagagcttcaggtggcatttgctgactgtgctgctgatatcaaatctgcgtatgaaagccaacccatcagacagactgctcaggattggccagccacctctctcaactgtatagctatcctctttttaagggctgggagaactcaggaagcctggaaaatgttggggcttttcaggaagcataataagattcctagaagtgagttgctgaatgagcttatggacn

SEQ ID NO: 34126 - DNA, 488 bp, Homo sapiens
  misc_feature (1)...(488): n = A,T,C or G
ggttgtnnnaggaagnnnnnntttgaaaaccggttgacctgcttacgccaagcttggcacgaggagaccatgaagctgttatcatggttcaggtgtgagatgctggtggcctggagtcaggttgtagctgtgcattggaagtgaagaggtaagacatggggtttactttggaggcagaaccagaagattttattttagattgggcgatctgaatataagggaaaaagagaaagagaaggattgaggatgactccaggttttatcctgagtaactgggtagatggtggcatttaccaactgggggaagacgagggaggggatttgggaagagtcagacagccagggtggaagcagaacctttcacaattcctccttgcacctcttgtaggagcagaaactctgcttttgttctgctttgctcctctggcttccaagggatggagcatatagaaacatgttctttttggcctacagggctccacagagag

SEQ ID NO: 34127 - DNA, 416 bp, Homo sapiens
gggcgtcctgcggttaagcagcgcgtgcccacaggcatgtccttcttcaacatctacaggaccctgagcggccttggccggctttacgactacaggcagcggtttgtgctgggcatggacacctccttcatcgagctttgtgagcgggagttccagagaggctccctcagggacagcaactacttcctggacacgcaatgtgacagcaacgtccgcaacaacggcaaacaggatggctatgtgcacttcgacgaggacagcaaggcttttgcttgctcctaccaccaattgcagtcctagatccaaaactctgaccccaatcgacccctgcagcgggggatgcagactcacgtgtaaggataacacaccgcggctggggacgggccagggaagacgtcaaggcacgttctgattgc

SEQ ID NO: 34128 - DNA, 384 bp, Homo sapiens
ggcccgagatagcccaggaccagccgaacgtgacggggatcatcgagggccccgtggcctacctgggcacgttcctcaacgacctggtgatgctggacactgccgtgaaagactatctgtatggcagactcatcaactttgagaagaggaggaaggagttcgaggtgatcgcccagatcaagctgctgcagtcggcctgcaacaactacagcatcgcgccagatgagcaatttggggcctggttccgggccgtggagcggctcaacgagactgagagctacaacctgtcgtgcgagctggagcccccatccgagtcagccagcaacaccctcaggaccaagaagaacacagccattgtcaagcgctggagcgaccgccaggccc

SEQ ID NO: 34129 - DNA, 419 bp, Homo sapiens
  misc_feature (1)...(419): n = A,T,C or G
ggctttaaaggaaagagttgttggtgccattgcaggtgccccctccaggcctgactggctccgccaggcactaacctgccataaccctttgtgctggcctgcggccaggcagaggaagagaggtcgactgtggggtcatttggtgccaaacatggaggtgggcaggctcacctgttcctgggactgtctgagatggcagggcacttgccctggtggctcccacctgaccccaggccttttataggcaggagccccactgcttccagcctctggtgccaacacagttgccaaacccattgagcttggggctgccccgtggaggcctcctgggtatggaccaggggcttgttgagagctgagccatgcacacaggtgcagacaccccccaactcccatgcacacggntagtccaggcgcct

SEQ ID NO: 34130 - DNA, 384 bp, Homo sapiens
ggtggatggtttactgcgcacctaatgctggactaaaagctgtatctatgtggtttcatttagtcctcactgccatctgtgagttaagcatcatttacagatgacaaaatctgtaaatggcttaaagatgtcaagcaatttgcccaaaggtcccacagctaggaaacagtggggctgagggttgagcacagctttcaacaactgcgacttctgggagcccagtgactcttcccacaaaatctagtcctgatttggcaagtcttcagaagaaacagaatcatggtctgatgatcaaatttttccaagaaaattttatttaaaagtcaaagatgtccttcaaaatgaacagttaaaaatgtaaaagtcgatgtaaaatggaagtct

SEQ ID NO: 34131 - DNA, 396 bp, Homo sapiens
ggccaggagctcctgtgtcactgccttgtggcatcccctatttctgtggggatggggaggacaggccacttttggatacccttggcccatgaagggtcagccagagtggcttaaggattgcagagtggcagaaaaagccctggccatgtgcccacaagccccctatcccactcttttctgcctgctctgtgaccttgggcaagtcactgtccctctctgggccacaattgcctctaaaattgggacagacagctgctccctgtggcttctttcgcctggggcatcagtgcctctcccagccctgagcaacccccatcccacccccttcagagtcttggcagaatctggcctctgtaggtggccgccaccgagcccaagacggggcatggggctcct

SEQ ID NO: 34132 - DNA, 382 bp, Homo sapiens
ggctggccccactataaaaagcagcaccatatttgcgggcctgatcagataccctactctgccttcaaagtcaaaggggccggtcacggtggctcacgcctgtaatctcagcactttgggaggccgaggcgggcggatcacttgaggtcaggagttcgagaccagcctggccaacatggtgaaacccccctttctactaaaaaatacaaaaatcagctgggtggggggacatgcacctgtggtcccacctacttgggaggctgaggcgggagaatcgcttgagcccagaggtagaggttgcaatgagccaagatcgcaccaccacacttcagcctgggcaagagagcaagactctgtctcacaaaacaaaaaaaaagaagtg

SEQ ID NO: 34133 - DNA, 422 bp, Homo sapiens
  misc_feature (1)...(422): n = A,T,C or G
ggggctcttcaagctgcctgtgctgctccgtggagtgaaaaaggcagggtgtgctcgcagactgtgctataaactgcaatttctatttggggtcctcacggagaagaacaccaggaaagacagacaggaccagtgccatgggccagctttgctgctttcctttctcaagagatgaaggaaaaatcagtgaaaagaacggaggggagcccgatgacgctgaactagtaaggctcaataagaggctggtggagaacgcggggctcaaggctgtccagcagtatctggaggaaacacagaataaaaacaagccgggggaggggagctctgtgaaaaccgaagcagctgatcagaatggcaatgacaatgagaacaacaggaaatgagcccggaacgcaggcccccatgtctctgtgcaaagcctn

SEQ ID NO: 34134 - DNA, 387 bp, Homo sapiens
ggcctcgtgccagcttggcacgaggcctcccccactggaatgcatacccaggagagtaagggttcttcacaggcaggtcccttggcctgggcagagctggctcagtgtgtgtggactgcgcaaacagtgcagttctgctgaggggtatgctggctgtgcctcatttgtttttggcagttgtggaccctcatgtccatctctgtggggtcctttctgatctatttaaaggacatatggagaagcaggatagctagggcacaggggacaacctcacgaccgtcacctacttatggcagcccccaccggggtgccctctctcctcacacactccacctgctgccagaggaccctcatacccaagcatctgcctgctctgtgactgagcgc

SEQ ID NO: 34135 - DNA, 427 bp, Homo sapiens
ggcagatagcgaaagaagcaggagagcaagtcaagaaatacggggaaggagtccttcccaaagttgtctaggtccttccgcgccggtgcctggtcttcgtcgtcaacaccatggacagctcccgggaaccgactctggggcgcttggacgccgctggcttctggcaggtctggcagcgctttgatgcggatgaaaaaggttacatagaagagaaggaactcgatgctttctttctccacatgttgatgaaactgggtactgatgacacggtcatgaaagcaaatttgcacaaggtgaaacagcagtttatgactacccaagatgcctctaaagatggtcgcattcggatgaaagagcttgctggtatgttcttatctgaggatgaaaactttcttctgctctttcgccgggaaaacccactggacag

SEQ ID NO: 34136 - DNA, 388 bp, Homo sapiens
gggggtggggctttaggtgatgtgcctgtcattgacttgcatggaaggagaattggtctgagtaccctgggcagaggttggtcaggggtctggaacagaaacaattgaaaataaaagactaaagggtctgagttagaagaatgtggttagacacatgagagttggtattcagtatgcctactagaaaggattcaccatggaagaggtacgaaacaactttgcagacaaaatgactcagccagttgatgtcagccaatcttttttttgttttgttgtttgaggcagagtttcactctgtcaacaggctggagtgcagtggcatgatctgggctcactgcaacctccacctcccgggttcaagtgaatctcctgcttcaacctcccaagt

SEQ ID NO: 34137 - DNA, 404 bp, Homo sapiens
ggcctctggggagctcttcacaatgtagatttctgggcatcacccatctacaaattcagactcttgaggtgaaaccaggaatctgcagttaaaggctcccaggtgacttgggttcaggtggctttcagaccactcatggggaaacactacttcaggggtgccccttgcagtagtgcctctgtctcctcacctgcacccaccggaccaggtgtcacccacactttcctcggtatcttgcacatcggtcctcttgtatccatcctaaggctctcaccccgcttctgtccgtgttaactcatgttcattcccaacagactcatccctaggctctcccccaacaacccatccttttctggaacccctccactcccctcacacacaggctaatctttctctttccagtg

SEQ ID NO: 34138 - DNA, 435 bp, Homo sapiens
  misc_feature (1)...(435): n = A,T,C or G
gaggccncctttgaaacatgagacctcgtaacccgattacgccaagcttggcacgaggggaccgcctaagaatcgcgctgtaagaagcaataacctcttctcttcggctccgtcatcatttcggtagacgcgaaacagcaaccatgcgtgagtgcatctccatccacattggccaggctggtgtccaaattggcaatgcctgctgggaactctactgcctggaacacggcattcagcccgatggtcagatgccaagtgacaaaaccattgggggaggagatgattccttcaacaccttcttcagtgagaagggggctgccaagcatgtgccccggacagtgtttgttgacttggaacccacagccattgatgaagttggcactggtacctaccgccagctcttgcaccctgagcaacttatcacaggcatggaag

SEQ ID NO: 34139 - DNA, 418 bp, Homo sapiens
ggtggagttgctgataaagctcctaaggtgaaaacaaaatgtcacattcctctgctttctaaagggtgtcacagagactggacacatggtcccataggactcactagatgtgagagtcacagagccacttgatccttggcccctatagatataaaaaccatgtaaggaggttctgatccagaggagatgggcctcatgctcctgggatgaagcccctaccctgcccctacaggggtgggggacttgggcaccaagaatgagatattgggagatctgaaagcatgggagcttggcatctccatctccagcaaaaccacaggcccacttcacagctgtcacctggagttcttgggagaacttaatgtttgttccttaaaatgtgttccctgtagtgtggaggtggaaggtggtaaaggat

SEQ ID NO: 34140 - DNA, 448 bp, Homo sapiens
  misc_feature (1)...(448): n = A,T,C or G
ggtcgtcaaaacntttgaaaaccttggaagnacactcgaagaccacgantacgcgcagcttggcacgaggcgaagatcttggagaaggaaaaaaccgaatttgttaatttttctgtatttaatggcctgaactgagagttgagatggccaaagggagacaggccttttaaaatatatatatatatacacatatatatgcttatatacacatatatgtatgtatacacatatacacatgtgtatatacatgtgtgtatgtatacatgtatatacatatatacatacacatatatgtttacatatatacacatatatgtatacatatatacacatatatgtatacatatatatatattctacagtaaaactgtagactgtcctcgtacttggcattttcactgttctgtacaaagctgcttgtttttttattgcctaagtcaaataaacg

SEQ ID NO: 34141 - DNA, 427 bp, Homo sapiens
ggggttgtggttgaggccgggtctccgctcctgtgcccgggaagatggtgctaggtggttgcccggttagttacttacttctgtgcggccaggcggctttgctgctggggaatttacttctgctgcattgtgtgtctcggagccactcgcaaaatgcgaccgctgagcctgagctcacatccgctggcgccgcccagccggagggccccgggggtgctgcgagctgggaatatggcgacccccactctccggtcatcctctgctcttacctacctgatgaatttatagaatgtgaagacccagtggatcatgttggaaatgcaactgcatcccaggaacttggttatggttgtctcaagttcggcggtcaggcctacagcgacgtggaacacacttcagtccagtgccatgccttagatggaattgg

SEQ ID NO: 34142 - DNA, 418 bp, Homo sapiens
ggatactgacagccgctctgctcatcaagagtgcagtgatttcctgggaacttagggggtgtcagggaataaggtgaaacaaaattcccccaagttctgtcctgttctgaactgccctggccatccagctgtgcccaccagatgtcccgctgagacagttcacaaaaacacaagccactgccttttttttttttgctttcaccatctaaaaatgtaacgggaagggtttgtattttgttggcgttctgcaaaaagggggtcaaacctgcagtcaggggaacgatgtttttgtcaatgacggaccgtgtatatgttggggatcgcaaaacatactggattttcactatatcttttttttttaaccggacaaacttttttgctttaattttaatggacaaaatgtgacatattgatgggg

SEQ ID NO: 34143 - DNA, 423 bp, Homo sapiens
gttggccccactccacttgggggtctgcattggattgttagggattggcagcagggctgaggcaaggtaggccaactgcacccctgtcacctggaggagggccagctcgctgcccgagctctggcctagggaccttgccgctgaccaagagggaggaccagtgcagggtctgtgcaccttccctgctggcctgcacacagctgctcagcaccactttcattctggacctgggaccttaggagccgggtgacagcactaaccagacctccagccactcacagctctttttaaaaaacagcttcaaaatatgcagcaaaaaccaatacaacaaaacgagtggcacgatttatttcaaactaggccagctgggattccagcttttcttctactagtctgatgttttataaatcaaaacctggtttt

SEQ ID NO: 34144 - DNA, 421 bp, Homo sapiens
  misc_feature (1)...(421): n = A,T,C or G
ggtgcagctcaagtccatggtggccaccaagatcgccaaatatgctttgcctgatgagatcctggaggtgaaacgtcttccagaaaccaggtctgggaaggtcatgcggcggctcctgaggaagatcatcactagtgaggcccaggagctgggagacactaccaccttggaggaccccagcatcatcgcagagatcctgagtgtctaccagaagtgcaaggacaagcaggctgctgctaagtgagctggcaccttgtggggctcttgggatgggcgggcacccaagccctggcttgtccttcccagaaggtacccctgaggttggcgtcttcctacgtcccagaagcagcccccacccctcacgtgaagctgggctgagagccctttctcccatccattggaggttccaggagtggtaccn

SEQ ID NO: 34145 - DNA, 417 bp, Homo sapiens
ggtgcatgacagttgttttcttcatctgagcagacaccagcttcagatgctcgaggggagaaacatgcctttcagtttgggctactgggttacttaattaatcagccggcagctccgtcgatctattttcgtccctgtcctcttgacgagcccgggatggtttggagtagcatttaaaagaactagaaaagtggcccagaaacagcagcttaaagaattattacgatatactttgattttgtagttgctaggagcttttcttccccccttgcatctttctgaactcttcttgattttaataatggccttggacttggacgatttatcgatttccccctgtaagatgctgtatcatttggttgggggggcctctgcgtggtaatggaccgtgagagcggccacgccttcttctggagg

SEQ ID NO: 34146 - DNA, 418 bp, Homo sapiens
ggaaaaaccaataatcccagaaaacagcgcatagggtaggctgggccagccgaggattatgtgaaggttcgttgggaccctccggaggccagtggggtactgcaaagagccatgggggtgttgatgtccaagcggcagacagtggagcaggtgcagaaggtgagtctggctgtgtctgctttcaaggatgggctgcgggacaggccttccatccgacgcacaggtgagctgccagggtcccgccgtggcactgtagagggctccgtccaggaggtacaggaggagaaggaagcagaagcaggaacctcggtggtccaggaagagagtagtgccggccgcgcagcctgggagcggctccgagatgggcgcggcgtggagcctgaggagtttgacaggacaagtcgattcacaccccctg

SEQ ID NO: 34147 - DNA, 420 bp, Homo sapiens
ggggcgggtcggggaggcgcagcacgacccaatggaccagctgctgggaacaagatctgtcaatttaagctggttctgctgggggagtctgcggtaggcaaatccagcctcgtcctccgctttgtcaagggacagtttcacgagtaccaggagagcacaattggagcggccttcctcacacagactgtctgcctggatgacacaacagtcaagtttgagatctgggacacagctggacaggagcggtatcacagcctggcccccatgtactatcggggggcccaggctgccatcgtggtctatgacatcaccaacacagatacatttgcacgggccaagaactgggtgaaggagctacagaggcaggccagccccaacatcgtcattgcactcgcgggtaacaaggcagacctggccagc

SEQ ID NO: 34148 - DNA, 424 bp, Homo sapiens
gggtgcgtctctgaaccgcccacatttcaagtacttggtagctgcttgtggctagggcttccatgcaggaccgtgtgagtgtaaagatttaagagcacgagatttgtagcatggtggacctgtttaatgcagtttcttgactgctgtttatgggcattgtggccttgggtgggtgacttccccctccgagcttatgtgcacctcatagagttgtcgtcaggattgaacgggatgagtgcaaggaagggctcagcatggaacccagtgcatagtgaggggaaatgcgggtgattgtttacattgaagtaatgagccagaggctggcttggtgccagggcctgccccctgccccctgggctgactgtctaggcggggttgataacaaactgcccgaacaagggcagcgaggcatcataagtgtcaa

SEQ ID NO: 34149 - DNA, 411 bp, Homo sapiens
ggcagattcagaagtttcaggggtctgtttctatacatttgcctatgttaaaggggtaaaagggctctcttcattagacatgtggaagatgaagcagccccttcctttagagctgtgcctgcatggcactcttctcaccctggtacaccctccttatagtgggtatagtgatttttaaccctaaaataaaacaaacaacctcaccatgaagctttaggaccagaaaaggaatgacaagtgaagcgatgaagcaagccatcttcacagagtagaaaagacatcggagagttggtagataactgtctgaaaagatagttgttcatttgaaactattctgtgatacagtcatgtgggaagggatgtttggctgtgattattttttcaggtaatggataacaaattcttaacgct

SEQ ID NO: 34150 - DNA, 392 bp, Homo sapiens
gggggacccttggaaggaacagagaggcattagactaagccagttccatcctagcctggcccatccacccacttgggctggctggtctcattcatgatttcattccatgccctcgcaatccttcaggataacggtcactatcacccttttatttttattttttttttaatttttggaaactgcactccaccctgggggacaaagcaggaccctgtttcaaaaaaaaaaaaaaaaaaatttaagggggggtttaaaaacccaggggcttttttgaaaaaccccaaattttagggccccggggggggaaaaaagggggggaaaaataaaaaagccccaccccttggcttaacttgggcccaaatgcttaaaaaaaaaattttggtttttttcct

SEQ ID NO: 34151 - DNA, 415 bp, Homo sapiens
ggggagctagggacacacaaggtagaatgtgatcctggcctctgttaagcttacaatcttgggagacagatataaacaatctattttccttagagtttccttctcctgaagcttgggcacccaaacccatcaccactgtcccccccttcaatagtttctcctgtttacttggtggggagcatttctttatgtatttggagactttctatattatagagttgctgttgctacaagtgaaattagtctagcttcctacagagagggaagttactctctccctgttgattttcagagaagaaagaacccttgtaaagatagattccaaaccaagagacccaaggagcaagcgcattattgtgccataaataggccatcacttgggcaggtcctgggacagcctgggaaaggggactcg

SEQ ID NO: 34152 - DNA, 397 bp, Homo sapiens
ggcacaaacagatgtatttctagtctgtttttcagtgggctctccatcttcatttgaaaacgtgaaagaaaagtgggtgcctgagataactcaccactgtccaaagactcctttcttgcttgttgggactcaaattgatctcaaagatgacccctctactattgagaaacttgccaagaacaaacagaagcctatcactccacagactgctgaaaagctggcccgtgacctgaaggctgtcaagtatgtggagtgttctgcacttacacagagaggtctgaagaatgtgtttgatgaggctatcctagctggcctcgagcctccggaaactgaacccaaaaggaagtgcgtgatagtctaaactggtttctccttcccttctttgctggtgcttcct

SEQ ID NO: 34153 - DNA, 449 bp, Homo sapiens
  misc_feature (1)...(449): n = A,T,C or G
ggctaaaagccaaaatgggaaaggaaaagactcatatcaacattgtcgttattggacacttagattcgggcaagtccaccactactggccatctgatctataaatgcggtggcatcgacaaaagaaccattgaaaaatttgagaaggaggctgctgagatgggaaagggctccttcaagtatgcctgggtcttggataaactgaaagctgagcgtgaacgtggtatcaccattgatatctccttgtggaaatttgagaccagcaagtactatgtgactatcattgatgccccaggacacagagactttatcaaaaacatgattacagggacatctcaggctgactgtgctgtcctgattgttgctgctggtgttggtgaatttgaagctggtatctccaagaatgggcagacccgagagcatgcccttctggcttacacactgngtgtg

SEQ ID NO: 34154 - DNA, 432 bp, Homo sapiens
ggaaaagcttacagttttccacaaggactttaataactagctgggaaaagacgatgtaattatttcggggctctgcggaaccttctctgtacagcgccccctttctgttgtgctattggttgcagctgccatgctcaaaatgcgttttgagagctgaagcaaggtgcttgcagtcacctgaggccgtccgtgtggcccagggccccagctgcctttagggcccccattgttcataacagcatatgcatttccccaccgcgttgtgtctgcagcttctttgccaatatagtaatgcttttagtagagtactagatagtatcagttttggattcttattgttatcacctatgtacaatggaaagggattttaagcacaaacctgctgctcatctaacgttggtacataatctcaaatcaaaagttatctgtgac

SEQ ID NO: 34155 - DNA, 438 bp, Homo sapiens
  misc_feature (1)...(438): n = A,T,C or G
gacggggccggcngntcctttgaaacatcttgactcttacccagccggccgagaccggaaaagctttgtggagagctgggagaattccaacttctggaagaagtcaaggagagaaggccatcacgagttctttaggcctctgcagccatgaggggttggccatatgagaagcagcagcagccatggaccatctcatctgactcctccccagctatggtccttcagtcctcaaaaaatattaaaaagattagccctcaatgctagtaacactatgattacgggagaatctgcctctaagaagttataaataaaaaaaaaaatattcaaaaagtcaaattcaaagccgaatcaagttaagtactattgcataccactaaaagatggtctgaaaggaccaatgtctgtaagataaaatgtacaggaataggaaactcactg

SEQ ID NO: 34156 - DNA, 464 bp, Homo sapiens
  misc_feature (1)...(464): n = A,T,C or G
tgccagctccnngggataaccgttcctggatgacatccgcagcttggcacgaggagggcccagaggcttgtgaggaagccaggtggacccagccttagaagagtgggcatggggggcccctgatatctggagggggcgggttggcctcagtcatctttggagcagaagggctgggtcctggggccacagaccacaaggctcagcctccctaccctgctccctggggtgctgctgtcttggagagcacagctctggtgagacggcctgggcaggccgaggctgagaaaccagggaggatagaggagaaaagggcttgggcccccagccccagaagatgctggaccccaggtgggagacccaacagtgggtgcagtttctcagtagggctggagccaatggtgggggtggccccggcaggcctggctcctcacatcccaggggttggcttctgatttggggcttgg

SEQ ID NO: 34157 - DNA, 464 bp, Homo sapiens
  misc_feature (1)...(464): n = A,T,C or G
agtaacgtcccctggaaaccgttngtagactgacatcgccaagcttggcacgaggtggcgccctccaggaagttcttcgttgggggaaactggaagatgaacgggcggaagcagagtctgggggagctcatcggcactctgaacgcggccaaggtgccggccgacaccgaggtggtttgtgctccccctattgcctatatcgacttcgcccggcagaagctagatcccaagattgctgtggctgcgcagaactgctacaaagtgactaatggggcttttactggggagatcagccctggcatgatcaaagactgcggagccacgtgggtggtcctggggcactcagagagaaggcatgtctttggggagtcagatgagctgattgggcagaaagtggcccatgctctggcagagggactcggagtaatcgcctgcattggggagaagctagatgaaagggaagg

SEQ ID NO: 34158 - DNA, 402 bp, Homo sapiens
ggattgtcaaataacttgtgattgtcttgccatcaataaaataatgcatagttgtgttaaactacaggcaaacatagcccacgggaatatctccaccatttctctatgtactttatatgcacgggtgtgcatgcctgtgtgggccagtgtccccccaccatgggcacacccccaagtggtgcttgttggaagagtgcttacttacctcgagagaatttacaggagtccacatgacagtgtcctgcctggttggcagcgggggccatcacctgtggcctctgagaccgccccatttacaggaatctgcactgggtctcagtgaatgaacgtatggtagatttttattttcttggcactaaagattagcttttttaaaaaaacatcccataaaacagtagaaac

SEQ ID NO: 34159 - DNA, 461 bp, Homo sapiens
  misc_feature (1)...(461): n = A,T,C or G
gaaatgacccctganaccgttactgatgacatcgcaagcttggcacgaggtttttggtactaaagcctttactgtaataaaccaaatatatttacaatttatacaaatgtttaaccttcaacaaaaatacaaaaaaacatttcacaagatgcaaaaccaggaaacaagttcattggagacaccactgctctacaaaggacggaaagtgaggtgaactgcaaggaacagaaaggtaatctcacacttgggcaaggcgtgatccccagatcacccagaaagaaagaatgggctgtcatgtgagtcggcagattccgttcctcaatcctacaacccatggcccctctgtccgcttggccttggtgctccatttggtctatgtagacaggtgactttctgctgatggacttgtcgcctcctctttgtagactcaaagtagttttctgtcaaggtttggaaacagg

SEQ ID NO: 34160 - DNA, 401 bp, Homo sapiens
gggggcgccctccaagaagttcttcgttgggggaaactggaagatgaacgggcggaagcagagtctgggggagctcatcggcactctgaacgcggccaaggtgccggccgacaccgaggtggtttgtgctccccctattgcctatatcgacttcgcccggcagaagctagatcccaagattgctgtggctgcgcaaaactgctacaaagtgactaatggggcttttactggggagatcagccctggcatgatcaaagactgcggagccacgtgggtggtcctggggcactcaaagagaaggcatgtctttggggagtcagatgagctgattgggcagaaagtggcccatgctctggcagagggactcggagtaatcgcctgcattggggagaagctagata

SEQ ID NO: 34161 - DNA, 457 bp, Homo sapiens
  misc_feature (1)...(457): n = A,T,C or G
ggttctcgccctgaaaccntattacacgcctacgccaagcttggcacgaggtggcgccctccaggaagttcttcgttgggggaaactggaagatgaacgggcggaagcagagtctgggggagctcatcggcactctgaacgcggccaaggtgccggccgacaccgaggtggtttgtgctccccctattgcctatatcgacttcgcccggcagaagctagatcccaagattgctgtggctgcgcagaactgctacaaagtgactaatggggcttttactggggagatcagccctggcatgatcaaagactgcggagccacgtgggtggtcctggggcactcaaagagaaggcatgtctttggggagtcagatgagctgattgggcagaaagtggcccatgctctggcagagggactcggagtaatcgcctgcattggggagaagctagatgaaagggn

SEQ ID NO: 34162 - DNA, 398 bp, Homo sapiens
ggtggcgccctccaagaagttcttcgttgggggaaactggaagatgaacgggcggaagcagagtctgggggagctcatcggcactctgaacgcggccaaggtgccggccgacaccgaggtggtttgtgctccccctattgcctatatcgacttcgcccggcagaagctagatcccaagattgctgtggctgcgcagaactgctacaaagtgactaatggggcttttactggggagatcagccctggcatgatcaaagactgcggagccacgtgggtggtcctggggcactcaaagagaaggcatgtctttggggagtcagatgagctgattgggcagaaagtggcccatgctctggcagagggactcggagtaatcgcctgcattggggagaagctaa

SEQ ID NO: 34163 - DNA, 546 bp, Homo sapiens
  misc_feature (1)...(546): n = A,T,C or G
gtcacgctctcgcgacccgctctctgttttcttccatctttctcagtcttcgggggggggggggggggggnccctcacccggannnnnnnntttgaaaacactttgaccacgttacgccaagcttggcacgaggggccaaacggactgtctttcatccaccactgcctcctgaaagaccctgggtctgagtcttagccagtccatggagaccttgactgctggaagaggataggcattgtaggactcctcctgagactcattctgtagaggacacttgcacaggatgccaagaaaagacataaagagggccagcaactgtggccaacatagctgctcatcttggctataagtgtgctgctcggtttcattgctaaagtcacgaaggtgatgaagttgaaacaggttaatgacagtgacatgaactaactgctgagagttgaaagctttttggaatagcagcctcttaaactgttcttccaatttctctcgaagagggctcaacttttccaagctcttactcaggtacacatgaccgtggaatttag

SEQ ID NO: 34164 - DNA, 487 bp, Homo sapiens
  misc_feature (1)...(487): n = A,T,C or G
tggagggcccccnttgganaacgntatgatagagantcctctcagcttggcacgagggctctagtgtgatcaactgcagaagcattacaccgtggcctggtttctttactcagcccctggggtagatcccagccccccgcataggtccttttgctggaaaaggaagatggagtggtgggacgaatctgaggagtcgttggaggaggagccacggaaggtgctcgcccctgagcctgaggagatctgggtggcggagatgctgtgtggcctcaagatgaagctgaagcgacggcgagtgtcgctcgtgctccctgagcaccacgaggccttcaacaggctgcttggtaggaggacaccccagagagcacctccaatcctgttctttccaaaaacaggaaacttccaataaccacacttttccaatgggaaaaataggccccagtgggtgagctctccatgtgggaggaatgtgaagtgatcactcatg

SEQ ID NO: 34165 - DNA, 400 bp, Homo sapiens
ggagttgatgatgatggcgatgatgatggcgatgatggcggcactgatggccccaggcacagtgcaagtgatgactacttcatcccaagccaggcctttctggaggccgagagagctcaatccattgcctatcacctcaaaattgaggagcaaagagaaaaagtacatgaaaatgaaaatataggtaccactgagcctggagagcaccaagaggccaagaaagcagagaactcatcaaatgaggaggaagcgtcaagtgaaggcaacatgagggtgcatgctgtggattcttgcatgagcttccagtgtaaaagaggccacatctgtaaggcagaccaacagggaaaacctcactgtgtctgccaggatccagtgacttgtcctccaacaaaaccccttg

SEQ ID NO: 34166 - DNA, 454 bp, Homo sapiens
ggaagtcctttgataccctcctgataacatgccaagctcgcacgagggtccctgacagacgcggaatctgggtgcagttcctgcattaccccactctacgatcagggtggcccggcggaaatcctgccctttctgtagctgggcagtgcgtatcacgcttcccgcaaggacatgctggatgccttgggcataactgccttgatcaacgtctcagccaattgtcccaaccattttgagggtcactaccagtacaagagcatccctgtggaggacaaccacaaggcagacatcagctcctggtgtcaacgaggccattgacttcatagactccatcaagaatgctggaggaagggtgtttgtccactgccaagcaggcatttcccgggcagccaccatctgccttgcttaccttatgaggactaatcgagtcaagctggacgaggcctttgagttt

SEQ ID NO: 34167 - DNA, 398 bp, Homo sapiens
ggagcctttgctggtgtttttaaaatacctggactcaatgacaaagaccgagtcttctttttttttaaacaaaaacaaaaaaagcaaccagggctatttgtacagttgaaggggtgaacaaaatgggcggctgtgctgggagttggaaaaccgggcagcccgctatttaaagccatccctcattcagctggcagggacaagccaacgccaggtagcatgtggccacccttgcccagtgtctgtggcctggcaagtggccacgccctgtgtcaaaccatctgggaattaagctccagacagacttacagatgccttccttaggagttcttgcttcttgcgttgatactttgccccagaaaggcctgggattcattctggttcttatcagggtgtgtcca

SEQ ID NO: 34168 - DNA, 454 bp, Homo sapiens
ggcagtcccctgaaaacgttgactgatgaccatgccaagcttcgcacgagggcgggattgtgctgctgaccttggggctggtgggcccctgtggagtaagaggggctgctgcaggctcctccacaggcggcatggccctccgattcctcttgggctttctgcttgccggggttgacctgggtgtctacctgatgcgcctggagctgtgcgacccaacccacaggcttcgggtggccctggcaggggagttggtgggggtgggagggcacttcctgttcctgggcctggcccttgtctctaaggattggcgattcctacagcgaatgatcaccgctccctgcatcctcttcctgttttatggctggcctggtttgttcctggagtccgcacggtggctgatagtgaagcggcagattgaggaggctcagtctgtgctgaggatcctggctgagca

SEQ ID NO: 34169 - DNA, 406 bp, Homo sapiens
  misc_feature (1)...(406): n = A,T,C or G
ggcggctcactgcagcctcgacctcccgggctcacgtgatctcccatctcagcctcctgagtaaccagaaccacaggtgctcaccaccatgcccagctgactttttgtattttttgtagagatggggtttacccatgttgctcaggctggtctcaaattttcgagctcaagtgatccgcccgccttggcctcccaaaaggcatgagccactgcgcctgacctacgatttctttctttatatatcagnatgaacgcaagggctgtttgttggattctgtgagtcataatctgatactgtttccacgctttggccattgggagctcctggagattgtctcctgtgccctatccttatttaagcacttgtttattttgggatgtcttcagttttccttgtcccagctcn

SEQ ID NO: 34170 - DNA, 414 bp, Homo sapiens
ggcacggccttcgccagcgtggtggacatcaagctgctcctgcgcatctgggacctgtttttctacgagggctcccgggtgctgttccagctcacgctgggcatgctgcacctcaaggaggaagagctgatccagtcagagaactcggcctccatcttcaacacgctatcggatatcccgtcgcaaatggaggacgcggagctgcttctgggggtggccatgcggctggccggctccctcaccgatgtggccgtggagactcaacgccgcaagcacctggcctatctcattgcagaccagggccagctcctgggggccggcaccctcaccaacctctctcaggttgttcgccgcaggacccagcggaggaagtccaccatcactgctctgctcttcggggaggatgacctggag

SEQ ID NO: 34171 - DNA, 420 bp, Homo sapiens
ggcactatgttgcccaggctgttctcaaactcctggcctcaggcgatccaccttggcctcctgaagtgctggggttacaggtgtgagccactgcgcctggactgagtgtttgtttctttaaaggatcttatatttttcctgtgctacataccaccacagcagcccagcttctgtggggagagaagttgaaggatcccgaagctttataaaaaggatctcagctgtggcacaggcagtgttatgcgcctcactgccacattggtgctgttgtattgaaggtggtgcttctggccttggcccttttgagttggtttccatttgggctgcaggtgactcagtgactccctcctcaagctgtcctcctgctaagaccagcagtcacaaacccatggcaagggtgagtgtgaaggcctaaccctt

SEQ ID NO: 34172 - DNA, 417 bp, Homo sapiens
gggcttggtttatctggtgcaaaggccaactaccgtggaggtgaaatccgagaacagaatggagacagtcttgtccatgctgcttttgtaacagaaagtgctgtcgcgggaagtgcataggcaaatgcatttagtgttcttcaacatgtcctcggtgctgggccacatgtcaagaggggcagcaacaccaccagccatctgcaccaggctgttgccaaggcaactcagcagccatttgatgtttctgcatttaatgccagttactcagattctggactctttgggatttatactatctcccaggccacagctgctggagatgttatcaaggctgcctataatcaagtaaaaacaatagctcaaggaaacctttgcaacacagatgtccaagctgccaataacaagctgaaagctgga

SEQ ID NO: 34173 - DNA, 477 bp, Homo sapiens
  misc_feature (1)...(477): n = A,T,C or G
atcgaagccnttgtagagaaccctccagctggcacaggagcgcagaatttcttgaccatctatacacatggattccccgtccatctggagaaaaatctatacgaaaacaagagtggactgcaagcattccaaagtcccagctaattggcattccataccctcacaatgtccctagaagttggagtgccaaactgtatcttacaccaaggaatattgctctgcttactgctatagctctcatcggtgtctgggttttcatcttggcaataattggcattttacattggcaggaaaagaaagcagatgatagagaaaaacgacaagaagcccaccggcttcattttgacgctatgtgacttgcctttaatattacataatggaatggctgttcacttgattagttgaaacacaaattctggcttgaaaaaataggggagattaaatattatttataaatgatgtatcccatggtaattn

SEQ ID NO: 34174 - DNA, 479 bp, Homo sapiens
  misc_feature (1)...(479): n = A,T,C or G
atctcggccncaattgatagctattgacangacacgccagcttggcacgaggccgaatgctttcttgaagttggctaatgtgttgttcactgaatgactgacctacagttgaggaagactggcacaccatggtgtctgacacctcagatgttataggtgtacaagagtctgtttcttgagatgtgctgctgtctccattttgggagcttaggaaactagattcctgattcaaattttggacatcacagtcattagcattatgtagatcctctttatgtctcaatgtttcattattactgttctgagtataattaatgacttcaatcactccattgcaattaatttctgctgcaccaccctctgtatcacgttccataagcgtttgatcctggccaatggtacttgactcttctaaggaacaaacgaacaaaaaaagatatatgcatatgtgtgtgagtgaaagaacagaaacatttctn

SEQ ID NO: 34175 - DNA, 431 bp, Homo sapiens
gggcgttttctccaaattccagcagcatccggtgaggcccctgctgaccgaatgagtcacacgcaggctccagctcctgggaacccttagagacccttttccaggcccaagctgtggtcctgcctgggaccctgcccagcaaccccaccaggatgggtccctctgctctcttcagcccctgctgtgccaggatctggtcatctccatccacccacatgcatccctgtgggcgtccccagcacagcagcactgggccaaggagggtgcccaggatgggcacagcctggcctcagggcgcaggggactggagagcccccaggaagggcaccagccatgagatgctggcttccccgcatcgggggtacggcagcagacacccatcccagatcctgtcgaggtgaggcctgggcgagtggatggacgtcacacaa

SEQ ID NO: 34176 - DNA, 418 bp, Homo sapiens
gggtctaatgagttctttggtctgttctgctgccttttacgttttcttgtcctttcaaaaggggtcttgaaggaaacaaagcgaataggcaggtagcacagcacagctaccccttaccaagcagtctatggaaacaacccctcatccaaatcatgggttagttaagaatctaactggggcaattaagatgaattccactcacttcctggtcacttcagcagcccagcggcattgagccaaaatatacaattctgtgttattagtgaggaaactttaaaactcatgtttgttattacttactacccaatttcattatcctcccttcctctttccatttctattctctctcacttgaattctggcattatttttagtggcctctactgataatacctaccctagagtacataaaaattat

SEQ ID NO: 34177 - DNA, 397 bp, Homo sapiens
gggcattttctaactatgtttttaaaacctctttgaatgctgaaaggtcttccctcagctcactttgagtttttaaatgacattgtttttgaggccctaggcctgctgtctttttgaagccccacattctgaatttgtcagattgtttgctcatggtgtcgcataaccacttcttctatcccctgtactttcaaggataatttaggctacatgagattttgccttttgtgctgacttgacagcttcacttctgcctaagatgcgcctccactgtcacctgtaccaagtgccaaaacagcagaggggccagttagagcaagagctctgggggggccggaaagtctccctggagaaggccgtaatatctgggccttggaaggaaggacacagggctctg

SEQ ID NO: 34178 - DNA, 424 bp, Homo sapiens
ggccactgctgcggtgaatgaggaggatgagccgagcggtcgctggcaccgaggcctgaccatggacgaggaataccatgtgatcgtgctggggaccggtctcaccgaatgcatcctgtcgggcatcatgtctgtgaacgggaagaaggtgctgtgcatggaccggaacccctactacgggggcgagagctcctccatcacacccctggaggagctgtataagctgttttcagttgctggaggggccccctgagtcgatgggccgaggccgagactggaatgttgacctgattcccacattcctcatggctaacgggcagctggtgaagatgctactagatacagaggtgactcgctacctggacttcaaggtggtggagggcagctttgtctacaaggggggccagatctacaaagtggcggc

SEQ ID NO: 34179 - DNA, 412 bp, Homo sapiens
ggcctcgtgccatgggggccttcgggaggaggaggcggaggaggcggaggaggagggaaggaagatggcggccgtggaactagagtggatcccagagactctctataacaccgccatctccgctgtcgtggacaactacatccgctcccgccgagacatccgctccttgcccgagaacatccagtttgatgtttactacaagctttaccaacagggacgcttatgtcaactgggcagtgaattttgtgaattggaagtttttgctaaagtactgagagctttggataaaagacatttgcttcatcattgttttcaggctttgatggatcatggtgttaaagttgcttcagtcttggcctactcattcagtaggcggtgctcttatatagcagaatcagatgctgcagtaaag

SEQ ID NO: 34180 - DNA, 450 bp, Homo sapiens
  misc_feature (1)...(450): n = A,T,C or G
ggngacatccttagatgcccttcctgatgggcagctggtgagtcttcttcctgctattttagagaggtgggtagcagtgcatggggttgctgaggcacgcaccctcggaacatattggtgtctctccctaatggggcagcctactctgtacatgtcagaaaaggtgcctgtgaagctggcaatgtgagcttatatgatcctggccatgttggccacaggtaggattagccattggcaaaaagccaggttggccaagattatttctggtgccttctcactttcacacccttttgtcattgcctcctgtgcaggcttcagggtcctggaatttctatttatcttctacacatctatggggattttctaacacatccaggacacattcccggcctctgtgtccatgccaaggtccttcatgccataccggggccccggcactgccatgatgac

SEQ ID NO: 34181 - DNA, 428 bp, Homo sapiens
  misc_feature (1)...(428): n = A,T,C or G
ggaacaagtgcagccgctgtctcgaaggggcctgtgtggtcaacaagcagagtggggatgtcacctgcaactgcacggatggccgggtggcccccagctgtctgacctgcgtcggccactgcagcaatggcggctcctgtaccatgaacagcaaaatgatgcctgagtgccagtgcccaccccacatgacagggccccggtgtgaggagcacgtcttcagccagcagcagccaggacatatagcctccatcctaatccctctgctgttgctgctgctgctggttctggnggccggagtggtattctggtataagcggcgagtccaaggggctaagggcttccagcaccaacggatgaccaacggggccatgaacgtggagattggaaaccccacctacaagatgtacgaaggcggagagcctgatgat

SEQ ID NO: 34182 - DNA, 415 bp, Homo sapiens
ggccactgatggaaacaaagtggaaggaaagatgctcaggtacagagaaggaatgtctttggtcctcttgccatctataggggccaaatatattctctttggtgtacaaaatggaattcattctggtctctctattaccactgaagatagaagaaaaaagaatgtcagaaaaacaataagagcgtttgcccaaatctgcctattgcagctgggagaagggggtcaaagcaaggatctttcacccacagaaagagagcactgaccccgatggcgatggactactgaagccctaactcagccaaccttacttacagcataagggagcgtacaatctgtgtagacgaagggggcatctggccttacacctcgttagggaagagaaacagggtgttgtcagcatcttctcactcccttt

SEQ ID NO: 34183 - DNA, 415 bp, Homo sapiens
gaggagagctcctcggagggcttggaggctgaggactgggcccagggagtagtggaggccggtggcagcttcggggcttatggtgcccaggaggaagcccagtgccctactctgcatttcctggaaggtggggaggactctgattcagacagtgaggaagaggacgatgaggaagaggatgatgaagatgaagacgacgatgatgatgaggaggatggtgatgaggtgcctgtaccccactttggggaggccatggcttactttgccatggtcaagaggtacctgacctccttccccattgatgaccgcgtgcagagccacatcctccacttggaacacgatctggttcatgtgaccaggaagaaccacgccaggcaggcgggagttcgaggtcttggacatcaaagctgagtca

SEQ ID NO: 34184 - DNA, 368 bp, Homo sapiens
ggccaaaaaggagagtcctgccacgattaacggctctctttggactctcccctatgatgggcctctttaagacattttgcttcatacctgggtcctgctagaaatggaaaatgcctagaaagatgacttgccaactgcaaggcacaaaggaatggaggctcataaccaattttcaagcatctcctgaggatcagaaagcaatatcttctcacagggcacttccactgagggaaacaacgtggacggaaagatcctcatggacataaaaggaccggccttggtcctcatgccatctataggggccaaatatattctctttggtgtccaaaatggaattcattctgggctctctattaccactgaagata

SEQ ID NO: 34185 - DNA, 452 bp, Homo sapiens
ggggagggccgcgcggctccaactgagacatcgttggatgcttacgccaagcttggcacgagggagagggcttcatcactgaggactgggaccagcccgtggccgactggaagatcttctacttcttacggagcctgcacaggaacctcctgcacaacccgtgcgctgaaaaggggttcgagttctggagcctggatgtgaatggaggcgatgagtggaaggtggaggatctctctcgagaccagaggaaggaattccccaatgaccaggtcaagaaatacttcgttacttcatattacacctgcctcaagtcccaggtggtggacctcaaggccgaagggtattgggaggagctgatggataccacacggccggacatcgaggtcaaggactggttcgcagccaggccagattgcgggtccaagtaccagctgtgcgttcagctcctgtcg

SEQ ID NO: 34186 - DNA, 470 bp, Homo sapiens
agcctcccatgaccacatcattagaacactacgccaagcttggcacgagggcgaaatggggataataatcatcatgatgatgatgacgattatccaaccatcaaaacaagacaataacagctgccaacctttgtgacactcaggatgcgccccactctgagcacttcatggatgtaccctcatttaaccctgacaatagctgtggggcaggttggcaattctgtctgtttgggagctgtgtagtctgaagcacagagaggttgaatctcctacctgaggtcacacagctggtgggagatggtgctgatttactcaggcctgagctctttgccctgggctccacctatgatacttctctactgtgtgcttggcacatctttaaatactcaaaaggtacctgtaggtaaaatcggggcttacaacttgggagtactgagaattacaaataaaggagtctttcacattctgtc

SEQ ID NO: 34187 - DNA, 407 bp, Homo sapiens
ggcctggcgccatgcggggccaaaagcgctgtcattaagacccacatttccccctccaccagctgaattcctgcaactcaggagccgccgccagagcaggaggaaccgccaatcgcgaggcacctctgagaacttcaggatgcaaatgtctccagccctcacctgcctagtcctgggcctgacccttgtctttggtgaagggtctgctgtgcaccatcccccatcctacgtggcccacctggcctcagacttcggggagagggtgtttcatcaggtggcgcaagcctccaaggaccgcaatgtgggtttctcaccctatggggtggcctcggtgttggccatgctccatctgacaacaggaggaaaaacccatcagcagattccaccacctatgggattcaagattg

SEQ ID NO: 34188 - DNA, 461 bp, Homo sapiens
  misc_feature (1)...(461): n = A,T,C or G
cgccctttgccctcggaatacagtcgtgaccancannacgcgcagcttggcacgagggctgaccatccgctaccccaaggagcacggcgtggtgcgagactggaacgacatggaacgcatctggcagtacgtctactccaaggatcagctgcagaccttctcggaggagcatcctgtgctcctcacggaggccccgctcaacccgagtaagaaccgggagaaggcggcagaggtgttctttgagaccttcaacgtgccggccctgttcatctccatgcaggctgtgctcagtctgtacgcaacaggacgcacgacaggagtggttctagactcaagggacggggtcactcatgctgtgcccatctatgaaggctttgccatgcctcactccatcatgcgggtggacattgccggccgcgacgtctcccgctacctccgactcctgctgcgcaaggaagggg

SEQ ID NO: 34189 - DNA, 403 bp, Homo sapiens
ggctcctcctcctgggttcaagcgattctcctacctcagcctccccagtagctgggattacaggcgcccaccaccacacctgggtaatttttatttttagtagagatggggtttcaccatgttggccaggctggtctcgaactcctgacctcatgatccacccgcctcggcctccccaagtgttgggattacaggcgtgagccactgcacccggcctaatttctgtatttttagtagagatggggtttcacgatgttggccaggctggtcttaatctaacttcaagtgatctgcccgcctcgccctctcaaagtgctgggattaggcatgaactaccatgcccagtggggtattctctttcaataaagctcctcttttccaagggagccacaccagaacagag

SEQ ID NO: 34190 - DNA, 458 bp, Homo sapiens
  misc_feature (1)...(458): n = A,T,C or G
ggtttggaaacaagcaggacagcgccttttctaacctagagaatgccctggacctggccccctcctcactggtgcttcctgccgtcgactggtatgcagtcagcactctgaccacttacctgcaggagaagctcggggccagccccttgcatgtggacctggccaccctgcgggagctgaagctcaatgccagcctccctgctctgctgctcattcgcctgccctacacagccagctctggtctgatggcacccagggaagtcctcacaggcaacgatgaggtcatcgggcaggtcctgagcacactcaagtccgaagatgtcccatacacagcggccctcacagcggtccgcccttccagggtggcccgtgatngtaccgtggtggccggagggctatgtcgccagctgctacaaaaacagccagtatcacctgtgatccatccctctgtgagtaan

SEQ ID NO: 34191 - DNA, 369 bp, Homo sapiens
ggacgatctcaacagggactcagaattttgtgagtctcttaaagacagctttggttctggagatcgcaagagaagcaacattgatagcaatgagcatcaccaccacggaattaccaccatccgcgtcaccccagtagagggcagcgaaattggctcagagacgctgtccatttcttcttcccgcgactccaccctgcggagaaagggcaatatcattctaatccctgaaagaagcaacagccccgaaaacactagaaatatcttctacaaaggaacctcccccacacgggcttataaggattgagtgatgtccattccatcattagggctactcgcaaaagaccatatgttgattctacctgtgttctg

SEQ ID NO: 34192 - DNA, 399 bp, Homo sapiens
ggcctgatgcagtggatcggattgttgcataccggttgggcatcaggcaggctggacagcagcgctggtgggagcaggagattaaaataaatgggaatattcaaaagggagaattaattacatataacttgacagagctaattaaaccagaagcttatgaagtccgactgactcctctcaccaaatttggtgaaggagattcaacaattcgtgtgatcaaatatagtgctcctgtaaatcctcatttgagagaatttcattgtggatttgaagatggtaatatttgtttgttcactcaagatgatacagataattttgactggacaaagcaaagtacagcaacaagaaatacaaaatatactcctaatacaggacctaatgctgaccgtagtggctcca

SEQ ID NO: 34193 - DNA, 507 bp, Homo sapiens
cgccccattgtatgagatccatatgacacacgacacgccaagcttggcacgaggggagagtggggaatcagacagccgcctctaggggctgggatctgctggggcctccttgttggggctgtaggcacccgccagggagcagggacccgacttgcagacgcattgcccggtactaggaaggagtgaggtgggttcccaccgtacacttcccacacgagctgcgggtgccagcctcgggccatcagcctaagagagcagatgcagctccaggggctcgacttatagccagttacagctccccggctcttctgtgtggcagagcgtcgtttccgggccctcagggctggggagctcagttcccattgcttgtgctcagggctgagtcttaaagaagggtttgccggccctaacgctgcagcgcgtgcgcggagagaggccctttttgagcctgtttactcctgtggccttgggcagaacagtaaatactctgtgcacggaggaaagact

SEQ ID NO: 34194 - DNA, 469 bp, Homo sapiens
cagcccccatcgccacattaatagatgactacgccaagcttggcacgaggactttgggcatgtgccctatggaagcttagtcacaagaggcactagctaatctacagattcctatccaatgccacattttaataaatcaccggaagcgggagaatgtagctcttatcttcggcgacctctgcatgttaactctgtttctgtgttaaaggcaatgcaggagtgtggattaagcaccagactgtattctcattcaaccatgaccgagcgcattaaaatcagtttgtaagggagacactgactccagccaagaaacctgagccccttttttttaggttcatattcaaagtcaaatgaactggatgaaagtcagtaccaatggctgtgcctataaatagacctgattctttgtttccctcgtcaattaaacaaaggcccagaaagagagaacatgagagggaatggtggattt

SEQ ID NO: 34195 - DNA, 510 bp, Homo sapiens
  misc_feature (1)...(510): n = A,T,C or G
tgcgcccctttgattgatatccntatgaccatgaccacgccaagcttgtcacgagggccaaaatgggaaaggaaaagactcatatcaacattgtcgtcattggacacgtagattcgggcaagtccaccactactgggcatctgatctataaatgcggtggcatcgacaaaagaaccattgaaaaatttgagaaggaggctgctgagatgggaaagggctccttcaagtatgcctgggtcttggataaactgaaagctgagcgtgaacgtggtatcaccattgatatctccttgtggaaatttgagaccagcaagtactatgtgactatcattgatgccccaggacacagagactttatcaaaaacatgattacagggacatctcaggctgactgtgctgtcctgattggtgctgctggtgttggtgaatttgaagctggtatctccaagaatgggcagacccgagagcatgcccttctggcttacacactgngtgtgaaacaactaattn

SEQ ID NO: 34196 - DNA, 461 bp, Homo sapiens
  misc_feature (1)...(461): n = A,T,C or G
ggtttggaaacaagcaggacagcgccttttctaacctagagaatgccctggacctggccccctcctcactggtgcttcctgccgtcgactggtatgcagtcagcactctgaccacttacctgcaggagaagctcggggccagccccttgcatgtggacctggccaccctgcgggagctgaagctcaatgccagcctccctgctctgctgctcattcgcctgccctacacagccagctctggtctgatggcacccagggaagtcctcacaggcaacgatgaggtcatcgggcaggtcctgagcacactcaagtccgaagatgtcccatacacagcggccctcacagcggtccgcccttccagggtggcccgtgatgtatccgtggtggccggagggctaggtcgccagctgctacaaaaacagccaggatcacctgtgatccatcctnctgtgagttacaag

SEQ ID NO: 34197 - DNA, 465 bp, Homo sapiens
  misc_feature (1)...(465): n = A,T,C or G
ggctcctccttaagtttatcccattgatnancntcggcaancncggcacgagggngaggtttggtattggctattattaaagtctttaaacgacactgtgtcctaaagtttaccttaaagtggcaatttgggatggtttaggtagctgattgggaaaactggggctttaaagtcgcttcttgcatgttcggagttagtcatccagctcaggcttgtgttgcagctgacaatctaagaaagacggccttaaagagtggtgcaggccccacactgacggactgccttataaacccgacttcctctagactttgaaccgccagacttttctcttgtttagaaaacaaacttatatttaatgtacttactacttaaaactccagacagagatataatgtagaaggcaaatattggccaattttttcctctttttaagtggaagacaaatgaacgggatttttaaagtgg

SEQ ID NO: 34198 - DNA, 472 bp, Homo sapiens
  misc_feature (1)...(472): n = A,T,C or G
tgggttnttatgacatntntattgatcatcttcgcaaccaccantacgccaagcttggcacgaggggcgcggagatgtggaggagaggaaccttgtccactggggttttcagagagctgggggtgtgaggtttgtgtgtgatgtttgaactcacgaaggaggattgacacttgtggggaatgacccgagtgccatgtgctgtgcccatgccaaataaatttggtttgaattcatcaggtgaagtattacaacgccgagagttacgaagtggaacgctatcgagaggccatcatcaaatatcacggtttggagtggaagtcgagcgcttcactggttttactaaatcagacccagaacctggtgattgggctcgggctcctcgccggctccctgctttgcgcatactttgtcactgaacagaagcttcaggttggggactatgtgctctttggcacctacattatccagctgt

SEQ ID NO: 34199 - DNA, 393 bp, Homo sapiens
ggaagagaacagaatcacttgaaaatggatgccagtcatctcttgttcccactactgaattcttataaagtggtggcaagatagggaagggataatctgagaatttttaaaagatgatttaatgagaagaagcacaattttgattgtgatgagtcactttctgtaaacaatcttggtctatctttacccttataccttatctgtaatttaccatttattgtatttgcaaagctagtatggtttttaatcacagtaaatcctttgtattccagactttagggcagagccctgagggagtattattttacataacccgtcctagagtaacattttaggcaacattcttcattgcaagtaaaagatccataagtggcattttacacggctgcgagg

SEQ ID NO: 34200 - DNA, 378 bp, Homo sapiens
ggttttagagacggtgcggaaacgatgagaactatgaccaggctagcctgctctcagaaccaagacttccagctctgaacacactccttaactgctcacgtgcaagactcccaccattctcactacacagaccacaacagaaaggaaccaaagcaaacctggagaaagcagccatggtttattcacggcacccgaagccagtctctacatcacacaagcggcacgtgagccacagagccgggaaccctgggcccagcccagggcccagcccagggacgtcgggacccatctctgccccagacttgccgtgcagtttggcttgggacctcagttatagctgggcagtggaccacgtacctctgccagctttaacctgtc

SEQ ID NO: 34201 - DNA, 406 bp, Homo sapiens
  misc_feature (1)...(406): n = A,T,C or G
ggtggagaggaggcagggagccacgagaatcacccccaggagtctaaaggccaaccccgaagccaggaagaatctgaggaaggtgaggaagatgccacctctgaggtggacaaacgacgcacgaggcccagacaccaccacgggaggagcaggcccgacaggtcctctcaaggagggagtcttccctctgaggaaaagggacacccccaggaggaatctgaggagtcaaacgtcagcatggccagtttaggggaaaagagggaccaccattcaacccactacagggcttcagaggaagaacctgaatatggagaagaaataaagggttatccaggcgtccagggccctgaggacctggagtgggagcgctatangggcagaggaagtgaggaatacagggctccaa

SEQ ID NO: 34202 - DNA, 378 bp, Homo sapiens
  misc_feature (1)...(378): n = A,T,C or G
ggaaccaccatggcggctgggaccctgtacacgaatcctgaaaactggagggccttcaaggctctcattgctgctaagtacagcggggctcaggaccgcgtgctctccgcaccaccccacttccattttggccaaaccaaccgcgcccctgaatttctccgcaaatttcctgccggcaagggcccagcaattgagggtgaggatggaatctgtgtgtttgagagcaacgccattgcctactatgtgagcaatgaagagctgcggggaagtactccaaaggcagcagcccatgtggagcagcgggcgagctttgctgattccgatatagtgcccccagccatgacctgggcgttccccaccttgggcatcaagcaccan

SEQ ID NO: 34203 - DNA, 434 bp, Homo sapiens
  misc_feature (1)...(434): n = A,T,C or G
natggagaccatcgngaccacttgacgcctatcttggcacgaggggcttatatacgtagggatagagtaagcagtacaaagtgtatattttggaaaagacaggtaacaggtaacagcatcgctaatccaattactgtgccttctaaacggagacactcagacacttgaactcatctttttatgactaataggtttttgattaaaaatgtgaacaagaaaatactaaaataaaaatcctttcgatttagccaactctttttgctgtaggctaggaatacacactttttaaattaacacactgtagatcctttttttctgttttaacattcctctaactcccccatttatcttttgtctattaatattcactagccaacatagtatttttgcagcctaagagttcattatttaaaaataaactaaagaaatatgtc

SEQ ID NO: 34204 - DNA, 439 bp, Homo sapiens
  misc_feature (1)...(439): n = A,T,C or G
nattgatgaccatctgngaccacaatggatgactatcttggcaccagggaatcatataaaaagcatattttagagcctttgatattacttggcaaagtacaacagctaccaaaatatacatctcaaattgtgggtagattcattaagccttttagcaatgcataccacgagttagcacaagtgtattcaaccaacaacccctcagaactccgaaacctggtgaataagcacagtgaaaccttcactcgcgataacaacatggggctggtgaagcaatgcttgtcatctctttataagaagaatattcagaggctaacaaagacctttttaactctatcattacaagatatggcaagtcgtgtgcaggtgtctggacctcaggaggcagagaaatacgttctgcacatgatagaagatggtgagatttttgcaagtatta

SEQ ID NO: 34205 - DNA, 384 bp, Homo sapiens
gaccagcctggccaacatggcgaaaccccgtctgtactaaaaatacaaaaattggccgggcgtggtggcatgtgcctgtagtcccagctactcaggaggctgagttaggaggatcgcttgaacccaggagacagaggttgaagtgagctgagatgtcgccagtgcactatggcctgggtgacagagcgagactccatctcaaaaaatacaaacaataataataataaaaacactgtgtgtccctgagtaaatgagttcacaaatatatagttgtttaaaatctgatcgaagaggctgggcacggtggcccatgcctgtaatcccagcactttgggaggcagtggcaggcggatcacttgagttcaggagttcaagaccagcttg

SEQ ID NO: 34206 - DNA, 477 bp, Homo sapiens
  misc_feature (1)...(477): n = A,T,C or G
nattganaaccgctangaccangatggagcaccatcggcacgagccaaaaactgttccttctctgccctcaaagactgaagccgcaggccctgttctgcctctgctcattaatctgattgctcttagagggctcttacaagagtccgtcgatgtttgctccctctgtcttatctctccttccaggattttcagacgcacaagctctgactcaggccacccagcacctggcagccttcctctgcgtgccagggaaatctctcccagtaggtgctcaggctcttcaccctctcgttgcagcagcccctctggcccgagattgtattttctagtctgctcaagaacagaggggcctggcgaggtggaggaagggaggctccctccccggggctggccgcctcagtgatggtgatgccaccagctccagcctgcacggatggagctcacttcctaccatcacttctgctttcagnctcctn

SEQ ID NO: 34207 - DNA, 442 bp, Homo sapiens
  misc_feature (1)...(442): n = A,T,C or G
gtggtcnnnnactgggacttgatgacatgattaccccaagcttggcccgactgtggacaaggtggccaggctggtgtccaaattggcaatgcctgctgggagctctaatgactggaacacggcatccatcccgatggccagatgccaagtgacaagaccattgggggaggagatgattccttcaacaccttcttcagtgagacgggggctggcaagcatgtgccccgggcagtgtttgtagacttggaacccacagccattgatgaagttcgcactggcacctaccgccagctcttccaccctgagcaacttatcacaggcaaggaagatgctgccaataactatgcccgagggcactacaccattggcaaggagatcattgacctcgtgttggaccgaattcgcaagctggccgaccagtgcacgggtctacagggcttct

SEQ ID NO: 34208 - DNA, 406 bp, Homo sapiens
gggcacgtcagagccctccagctaggcagaccccaccagcctggcagaacccagtcgcttggcagaacccagtgatttggccaaacccagtaatctggcagaacccagtgatctggccaaaccccattgtctggcccggccctgttgtctggccgaatccactggcctggcagaatccacctggatggcagactccacctggatggcagaccccaccgggctggcagggtcctccagactggcaaggtcctcctgactggccgctaccacccgactggccactgccacctgattggccacttcccactgactggccactaccacctgactggatccccgctgattggccaattccacctgactggcagaacctgcgcccctcgcctaacctgcgcccttcttccaa

SEQ ID NO: 34209 - DNA, 436 bp, Homo sapiens
ggagataggtaaattggagcccaggaaccgagatgatcacacagccttgtagggacagtacaagaactagaatgaaaatgctagctcctgactcagtgttctttgcacgaagccacactgcttcccaattcgctggtcagttattaaaatttgtcaggcctgccgaaggattgacatgctgggcaatgcaggccaccacggtggatctgtgactcctgaaggtggcaaagccctgcacactgccttgggatgagcacactgagctctgcagggcctcagctggaaggcgccatccaatcgtccttcccctccccagcagaactccagaggtggggcggctgccgcagggcccaaggctgcctcggcagggggctttgtgctttttgttgtggaggccaccagggattcaggaagatcctgaatgggttgcaattga

SEQ ID NO: 34210 - DNA, 424 bp, Homo sapiens
gggtgtagtggacatttaacagaacagatgcacccgattatctgattagaaatgtgtttcaacacacgggtccctttgcgtggttccaatctctgttttcggatctgggattctccacctgttacatcgttcactggaactttcctaccaaatacagcctcgctgataggcgcatcgtggaaaaatgaagcagcctgaagaaactctaatattgggaccgagtggagagatggaagaacatcatcaaagtggtgccgccgcacatgcgggaggcgtcccaggcagcattgctctttgtacatgagacaggataccactgtcttttatgcattagactgggaaccagataaaataaccttgtaaaacagatcttttatgtaagaaaaatacaactctcacctcgcaaacattcctgtctgttgcg

SEQ ID NO: 34211 - DNA, 393 bp, Homo sapiens
gggcgagacagccctggagaccacgtaccaatacccctccgagagttcggtactggaggagctgggcccggagcctgaggtccccagtgcccccaaccctccagcagcccaacccgacgacgaaaaggatgaggaagagctgctgctgctgcagccagagctccagggcgggctgcgcaccaaggccctgattgtggatgagtcctgccggcggtgaccatcttccaacatagggatatacctccctccttcttataactgaagatcctggagcccggaagattcagggcagacagaccctgataatgagcctggcagggaagggcaaccaacatcttgtaacttgctttccccaccctgtttctgggggcagagccaattgcccaatttcta

SEQ ID NO: 34212 - DNA, 439 bp, Homo sapiens
ggggcttttctcatccttgcctttcagccctaacccatgggactgcccacggattggagacttcaagggctgaaggctgggagctgcataaagggcattgcttcagcccaagttagaaatctgcctgggcaagctcttcctgccccagacctacaaagcagcagaccgggggctctggaggactagcccctgacattggtggggggccccacaccactccaccccaccctgccttccagctctcctgggcatttttttccctgtactcaaacagcctacccacccaagggttcctccctgtgcagcctaacaatgaacagtgcaccccgcagggcaaaggcccggcagtcaccaggccctgcatggtcagggcagaaaagcacaggggccaggagtcacttgagactatttcttaatgatggggggaaattgcacaatt

SEQ ID NO: 34213 - DNA, 396 bp, Homo sapiens
  misc_feature (1)...(396): n = A,T,C or G
atgtctcacttttcccaggccctggggaagggtctgagggtccctgccctttccctttgtagcagggtgaacaatgacagtgtgatgggtgcctgataaagacagggtgaggattggagtgactcagttcaaaggaagggcatcgggccaccagaaccagcagtcactgccaggaggcctggcagggcaggaggtcatggtggagaccggactatgacatgaccatatagtgaccctggccaacgtgggcacacaaggccagaactgctcctgcccagaaggccagaactgctcctgcccagaatcagggacagggcctcgggcccagctgacactgcaccccccaactctcctttgcagctttctgtatgagcccaatagccaagggtacaagtn

SEQ ID NO: 34214 - DNA, 469 bp, Homo sapiens
  misc_feature (1)...(469): n = A,T,C or G
attgaagcgcttgacctgatgaacnccgcttggcacgagggactattgcttagaatttgatgcataagctgtatgtttttcaagcactcctagaaggaaacacttccagggtaagcctctcagaagaaggctcacatcttacctctgatcttcccctaaataatcaccagcaggtgaccatctctttgcagcctttctactaaggagccaaggcaagagtattactcagatattgaaaatggatctcagctgtgcccctcgccttttctcccacgactcgtcatctgtgatgtttccaccagctttatttgcagagcacagaccacagggagccagtgtcttgggttagggttgtcttcacctgccctcgtctccaggcacgagaggcctgagaggctgctcaggagctaaaacattgtgaatgtccattcttgtaaaggatcaggtaccttagtattcggcagtttac

SEQ ID NO: 34215 - DNA, 481 bp, Homo sapiens
  misc_feature (1)...(481): n = A,T,C or G
ctccccactgagacgtcggatnnccactgagnatcgtagaaccancantacgccaagcttggcacgagggcgctggaccagtctgacgacgatatgtccgccgtgtaccgattctacatacactaaggtgtggacaccccgccctgacccctccaatcccccctctgaccccctcttcctcacatgggggcgggggcctgggagttcattctggaccagcccacctatctccatttccttttatacagactttgagacttgccatcagcacagtacacagcagcacccttcccctgaggccggcggggaggggacacgtgtcatcaagaatggcgtgagggaaagctcttgaactgggcactggccccccggacgaagtggctgagtgttcacacacacacacacgcactctctcacacgcacactgaggctctcgacacaagatagaatgtgcccataaactggtgcctggctttttttt

SEQ ID NO: 34216 - DNA, 418 bp, Homo sapiens
  misc_feature (1)...(418): n = A,T,C or G
tatgacacttcgatagacgacntcgccaagctcggcacgagggttggcatgtccactagctctcaactcagcattgatatttcatgggaactttttgaatcacaggaaagctaaaattcagaacctccctctacaggtgagatatggccaagccctgggttggaatgagagtggtctgagtgatttccttgttaagtcccaaaagaggagtgggtggaagcatttatctgctgtccttaattgtcatggagggtgggcagtggtggaagggtgctgttgagcctgcatataaactacagggagatattctctcactaaatatatacatcacttatagttgtgtaatcctcaagagacccccacatctccgactagcatagaagttggaagagtgaaagtacatagcttcaggagaagg

SEQ ID NO: 34217 - DNA, 384 bp, Homo sapiens
ggggagacccgagtgctccttcccagagtgagctgcatccagccctgtcccaggccttccaaggaaaaaatagtcctcaagtattgagtgagttctcggggccaccactcacacccaccactgtaggagggccaagaaaggcatcatttaggttccgagatgaagacttttattccattttgtcattgaacagcagaagagaaagcgatgacactgaagaggaaacccagtctgaagaatgtctgtgggttggtgtgcgctcaccctgttctccttcccatcacaaaagaagtagatttggggggacatcgacccctcaggccaaaaataaaaattttgaagaaaatgctgaaaattgcagaggtcattcttcaagaagaagtg

SEQ ID NO: 34218 - DNA, 389 bp, Homo sapiens
ggaaatactctctgatacctgatgaggaagaggaaaaggaagaggcaaagtcagcagagtttgagaagcctgaccctacaaggaatccttctagaaaaagaaagaaggagaagaagaaaaagaaacatagagataggaagtcatctgactctgacagctcaaactctgagagtgatacaggcaagagggcaaggcacacatcaaaagacagcaaggcagcctagaagaagaaaaagaagaagaagctcaagaagaagcacaaggagtgagagtataaagagtgtagggggtggttgagagtaagaaaccaggagccttgtgccttgagactcctggaaagactcaatagtgagaatatagcctcccaccccattaacttcgctcccatg

SEQ ID NO: 34219 - DNA, 421 bp, Homo sapiens
agagagcagctcgcttctaactggactgcacgttggtgacagcgtcccaagctggtgacagacccactctgtaactttcagctagattcagccaccagatcccagaaacatgacccttgctgcctacaaagagaagatgaaggagctcccgctggggtccttgttctgctcctgcttcctggccgatcccctgaataagtcgtcctacaaatatgaagcagacacggtggacctgaattggtgcgtcatttccgacatggaagtcatcgagctgaacaaatgcacctcgggccaatcctttgaagtcatcctgaagccaccctcctttgatgggggtcccgagttcaacgcctccctgccaaggcggcgagacccatccctggaagagatccagaagaaactagaagcggctgaggagcga

SEQ ID NO: 34220 - DNA, 411 bp, Homo sapiens
  misc_feature (1)...(411): n = A,T,C or G
ggcagtcattgatgaagttcgcactggcacctaccgccagctctttcaccctgagcaacttatcacaggcaaggaagatgctgccaataactatgcccgagggcactacaccattggcaaggagatcattgacctcgtgttggaccgaattcgcaagctggccgaccagtgcacgggtctccagggcttcttggttttccatagctttggtgggggaactggttctgggttcacctccctgctcatggaacgtctctcagttgattatggcaagaagtccaagctggagttctctatttacccggcgccccaggtttccacagctgtagttgagccctacaacttcattctcaccacccacaccaccctggagcactctgattgtgccttcatggtagacaatgaggccan

SEQ ID NO: 34221 - DNA, 386 bp, Homo sapiens
ggcgcgaagcagccaccatgcgtgagtgcatctgcatccacgttggccacgctggtgtccaaaatggcaatgcctgctgggagctctactgcctggaacacggcatccagcccgatggccacatgccaagtgacaagaccattgggggaggagatgattccttcaacaccttcttcagtgagacgggggctggcaagcatgtgccccgggcagtgtttgtagacttggaacccacaggcattgatgaagttcgcactgggacctaccgccagctcttgcaccctgtgcaacttatcacaggcaaggaagatgctgccaataactatgcccgagggcactacaccattggcaaggagatcattgacctcgtgttggaccgaattcgc

SEQ ID NO: 34222 - DNA, 460 bp, Homo sapiens
  misc_feature (1)...(460): n = A,T,C or G
tgaggggccnnncaggggttccactgagaccgtctgatagatcacatctccaagcttggcacgaggggtctccagggcttcttggttttccacagctgtggaaacctggggaactggttttgggttcacctcgctgctcatggaacgtctctcacttgattatggcaagaaggccaagctggagttctctatttacccggcgccccaggtttccacagctggagttgagccctacaactccatcctcaccacccacaccaccctggagcactctgattgtgccttcatggtagacaatgaggccatctatgacatctgtcgtaaaaacctcgatattgagcgtccaacctatactaacctgaatagggtaataggncaaattgtgtcctccatcactgcttccctgagatttgatggagccctgaatgttgacctgacagaatttcagaccaacctggtg

SEQ ID NO: 34223 - DNA, 386 bp, Homo sapiens
gggctggggccacttacatcgaccggctaagagtcgcgctgtttgaagcaacaacctttactctttgggtccgccctgagctgagcagtggcgaagcaacaaccatgcgtgagtgcatgtccatccacgttgggcaggctggtgtgcagaatgggaatgcctgctgggagctctactgcctggaacacggggtccagcccgatggccatatgccgagtgacaagaccattgggggaggagatgatgccttgaacaccttcttcagtgagacgggggctggcaagcatgtgccccggacagaggaagtagacttggaacccacagagattggtgaagagggtactggcacgtaccggcagctcttccaccctgagcaacatatgatg

SEQ ID NO: 34224 - DNA, 440 bp, Homo sapiens
  misc_feature (1)...(440): n = A,T,C or G
ggagaaccaagtgttttttcaggaaaacatggagcatctttctttcattcaggtgccaacaactgtccatcatttaccatccacacagtaaaatattaatgtttacaaaagaaaatacttacttttattgtaccatagaacttgatttttaaaatacagggccataaattccttaccacaaaatgatcttagccaggtagttataaaccttctgtttttaaaccaaaaaaatcaaatagcacttacatattggtagaaatatatgtctgtgagtgacctactacctattgatttgtattatacatcatattatacattgccaatgtcttgtagtcaggaacagacctgtggttgaacaagttgtgtttattattcacacacaccatgaggctgtgatcccacctatgtgggaagctgaggcacaagaatcacttgaaccn

SEQ ID NO: 34225 - DNA, 439 bp, Homo sapiens
  misc_feature (1)...(439): n = A,T,C or G
gatgcggcncccgactgggacttcgngtagacaacatctagacccgatcaagggnggcttggcgcgaggttgggtttccacagctgtggaaacttggagaactgcttctgggttcacctccctgcctatggaacagcgccttaatcgattatggcaagaagtccaagctggagttctctatttacccggcgccccaggtttccacagctgtagatgagccctacaactccatcctcaccacccacaccaccctggagcactctgattgtgccttcatggtagacaatgaggccatctatgacatctgtcgtagaaacctcgatattgagcgtccaacctatactaacctgaataggttaataggtcaaattgtgtcctccatcactgcttccctgagatttgatggagccctgaatgttgacctgacagaattccagaa

SEQ ID NO: 34226 - DNA, 413 bp, Homo sapiens
ggtttaacgtaccaggactctacattgcagttcaggcagtgctggccttggcggcatcttggacatctcgacaagtgggtgaacgtacgttaacggggatagtcattgacagcggagatggagtcacccatgttatcccagtggcagaaggttatgtaattggaagctgcatcaaacacatcccgattgcaggtagagatattacgtatttcattcaacagctgctaagggagagggaggtgggaatccctcctgagcagtcactggagaccgcaaaagccattaaggagaaatactgttacatttgccccgatatagtcaaggaatttgccaagtatgatgtggatccccggaagtggatcaaacagtacacgggtatcaatgcgatcaaccagaagaagtttgttatagac

SEQ ID NO: 34227 - DNA, 425 bp, Homo sapiens
ggtgttgctggggtgacggcagaattcaaaacttcaatttcagtgacgccaagcttgatgtgtttctgttattgttttgaagaaggtagctcttgtggaggacttgggagaaggatggggtcttaggaaggaggtgacagcacttgcatggtcacttgagcccacacacacgctcaaccccaagtcctttatgctttgtcacagtgaagatgagacctctgacgtccaagccttgttcctgtgctgcatcacccactcagccttccaaagggaacaggaacaaatttccccagcaccactgtttgggtcccgcttttcctatcttctgctgcccctgagcacatccaagcagacagggaaagaggagtcagacatggcccagtcacatcctgagctgctcctggctgataaccacgatggagccc

SEQ ID NO: 34228 - DNA, 419 bp, Homo sapiens
ggccctcgcctacagaggcggcgctgtccctgatcgagcggcgggagcgagggttcaaagatgggcagtgagaaggagcagagtccagaaccacacctgcctgaggaaggggaagggggtaagccttggagagtggatgactcaaagggttcttggatcccacctggggagaaggagcatgggcaagagagcctgtcggatgaactgcaagaaactcatccaaaaaagccatggcagaaagtcactgtccgggctcgagagctaggggaccccattgctcatccaaggcatgaggcagatgagaagccctttatatgtgcccagtgtggcaaaaccttcaataatacctccaacctgagaacacaccagcggatccacactggtgagaagccttacaagtgttctgaatgtggcaagag

SEQ ID NO: 34229 - DNA, 418 bp, Homo sapiens
ggggagaaacagaccacagagaggtctggagttgaggctgttgtcagcaaagcccctggtcccacacagctctgccctagagccacctctttgaccctttacccaccctgagaccagaacttgcagcccctctgcagatctcctctggccactgcagcccctccaatgggctttttctctcatgcattccctggcctggaggcgtcagggaccccacatcctccctgctcctcagactcacagcccctccatgttacctcccgcacctcctccctggggcagctgctccctgggcctctgaggatgtcagctcctggctccctgcctctctcccactccactcctggctcagtcttagagatttctatgccctcatggattctacccctgccttcctggcctcttgattcttggcttg

SEQ ID NO: 34230 - DNA, 419 bp, Homo sapiens
ggagtttttataccttgttaagttttagctttttgtcattggtcattatatgttcattggattcataaaatatatgaatatacatattttgtacccaaaccaatagtgaatttacctgaagaatccaagagaatcactaaaactactataaataataaacccgttctgtcatctgtaaaaaaatttacattttcatatccaagttttaaataacatttctcttatccagatcatttttttaatatgatgaaaaaggaatttgctcttgggggtaatggaagcaattttagtgttttcccattaagcacaatgctcacttttggattaagatatacgtgttttaacttggtaaggattcatctatttctattttactaaaaatttttattaagactgggaatgattgtaccaaaatggaa

SEQ ID NO: 34231 - DNA, 420 bp, Homo sapiens
ggaacatttaaaattttttattcctctttcggggagggtgttcagatcttttgctgattttttttcaaaccattttctttcttttttttaactaacccagcacaaagctgattttttttttagttttcttactggggagaccttgattagtaaactggacaaaaaacttgaacagatagttcacaaaaaaagagaacttggtaaactggggaaatgttcaggttggcagtaataaaaccactttttaattagctgctggactacctgggtattttttatctttatatttcagaaatggatgttttactcgagggagcagtctactgtgcaagtgggagaatatgataaagttggaggagcagataaatagaatattggcattatgaaaaaaataaaacattcacgataacctggttgctt

SEQ ID NO: 34232 - DNA, 418 bp, Homo sapiens
ggcggggcggataagctgggcccaaactctgagacggaccacgtgacgcccatgatcagcaagcacctggagcagaaggaggcattcctgaaggcttgcacccttgctcggaggaatgcatacctcttcctgaaatacctgcacaggaacagcgtgaacatgccaggaatggtgacgcacatcaaagctcctgaacagcaagggaaaaatatcttgaatgaactcttccaacgggagaacagggtattgcattactggaccatgaggaagagacggctggaccagtgtcagcagtacgtggtctttgagaggagtgccaagcaggctttggaatggatccatgacaatggcgagttgtaccttttcacacacacctccacgggctccagtatacagcacacccaggagctcctgaaag

SEQ ID NO: 34233 - DNA, 418 bp, Homo sapiens
ggagaaagcactaaacgtctccagaaaatgtgcgtaatgtctccaatgctctgcaaaccgtaaattgaaatgtgactaaagaaatgaaactgatttccgtaagacatggacaaacactagtctcattgcttttcagtttctgtacactgtgtgactgtgaagtttgacagctgaattgactcccaacttaagtagaaatagggaaagtgctttgcaagaagtggccgacaccagaacaccccgacagcagggatatctgccctgtcaggctcaccagcttgtgtgtgtgttttcagaacaagcgagtgagcatcaataaagatgagctgaagtcaacgtcaaaagctgtcgaaaccgttcacaatttgtgttgcaacgagaacaaaggggcctctgaactagtggcagaattgagcac

SEQ ID NO: 34234 - DNA, 481 bp, Homo sapiens
  misc_feature (1)...(481): n = A,T,C or G
catcgacacccctnnaattgataactcttgaccatgacacgccagcttggcacgaggagattgnctcctccatctttcgaaccaacacctttctcgaggccccctagtttctccgtccctacacaaggagctccttcccaagggtagatcggaccgttcatgctgcctataggcattatgtccctcaaaaaaaaactcctttgcctgcatcctgggtacaacatgacatttttaaccaatccaatctaaaaatgggccagaatccacctgtggcccgaatcgtgatcggatcctctttctactccactgaagatgaccaaacctgtgccgctgccactttcctcactgatattgggaggagggcaaggcccacccgaagttccactaaaaatgccccaagagaatatgcaccggctggcttgccaaagggttcgggatttattgctttctgttttttcttttcccgacagcacaaaaaaat

SEQ ID NO: 34235 - DNA, 472 bp, Homo sapiens
  misc_feature (1)...(472): n = A,T,C or G
catgaagccttgaatgaacacgttagcannggacgagggacttgagatatccgnttgacatggtcggccgcttggcgagcaacccgaagttgggtgtcagttttgcccgcgtcgcaggatcctcgacgacgcgggccaggtaacgccgatacccggcgatgcaccacgcgtcgaacctgtccatgagtggatgcacgatgctgcgcgggcccttgatgattccccgcaacaccaagtcgatgacgactagtgcgctgccgtgaagggccggttgcacgcccggcacggccagtatcgtcttgagccaagggggcacccggaagtccggcttgggaatcgaccacaccggcgtgcgctgaaagacggtcagcgtgccgacctcgggtgcgatggacggaatgatctgcaccgcactggctcccgtgccgatgatgccaactctctggcccgtcatgtcgtagtcggggtccca

SEQ ID NO: 34236 - DNA, 424 bp, Homo sapiens
gggttttaagtgcatacagacaagattctcaaatcatttttgtaaattgacattattatcatgtcaccaccctattgcccaggctggagtgcaatagtaataaggtcaacttttggaacccttctgcaaatttcctaggatttttagagtagcttcctagcttttccttacattgctgtatatcagttatagagaaggggacctgcaataggactggccattcggctcctgctgcttccctacggggtagcaaggctggagggagagtagaatatggtgttccccactgagtgtttgggggacttagtagggtccccagtgtttgctcctggttttagcctcaggagcacttggtaagggggctatagggatggtcgctcttcacccttagagacaagtggctcttgtaaaagggggtcatctg

SEQ ID NO: 34237 - DNA, 480 bp, Homo sapiens
  misc_feature (1)...(480): n = A,T,C or G
nattgagagccnnttgattttggacacgctcagcttggcacgagggcctgcagcagatgaaagccaatgatcctagcttgcaagaagtcaacctttacaacattaagaacattccaattccaaccctgagggaatttgcaaaggctctggagaccaacactcacgtgaagaagttcagcctggccgcaactcgcagcaatgaccctgtggccattgcttttgcagacatgctgaaagtaaacacgaccttgacaagtctaaacatagaatcccattttatcactggaactgggatcctggccctggtagaggcactgaaagaaaatgacaccttgacagaaatcaagattgacaaccagaggcagcagttgggaacagctgtagagatggaaattgcccagatgctggaggagaattcaaggatcctcaagtttggataccagtttaccaagcaagggccacgaacaagggtggcagctg

SEQ ID NO: 34238 - DNA, 442 bp, Homo sapiens
gggttatgttgcattttctcagctcctggggatggaaatggaggatcccagaacacacagccctggcccctttgattctagggcctggacagatctctggttcaaatgcacaggccctcacaatagaggaacatgaagagagatcttaaagcacacagtaaaatgtgagagcctgggtgtctgagaccgggagggcccaccagtgaggggcaggctcttctggtcaccaggctgttcagtggactcagttcttcatcttgtaatgtggatggctttgacacaccaggccaagcccatgccataccttgtaaagactgtcaaagtggttgtggataggtcaaactggctttggatctgatgggtaggaagaaacaagttagtcctcacatcacctggtccgggacagctgaccccctagaaccctggttctgccattagctag

SEQ ID NO: 34239 - DNA, 403 bp, Homo sapiens
  misc_feature (1)...(403): n = A,T,C or G
ggggcaatttataatttattactactttaaatcaaatgtagcattatcacactgtatttaaattgtcattttttaaaggaatattttcttcttaagatatatagaggattttggagaagagagacaggaggggtaaaaccagcttaaggttcagcgagcagaaagggacctgagaggatgctcactgtaagactgttggacagtggtgtgtattgaggggatgaatcggaacgatagtctcatgcagaaaatagtgagattaagatcatccttattggttctaaattatgtcaatcagatgaaagggatacgattgaaatgaaatcacatagttcgtgctcagaaattctattttggtatgtttgcattaccccttanaaaaaacactccgtttcagaattgn

SEQ ID NO: 34240 - DNA, 406 bp, Homo sapiens
ggtgctgccaataactatgcccgagggcactacaccattggcaaggagatcattgacctcgagttggaccgaattcgcaagctggccgaccagagcacgggtctccaaggcttcttgggtttccacagctttggggggggaactggctctgggtttacctccctgctcatggaacgactctgaagtgattatggtgagaagtccaagctgaagatgtctatttacccggcgccccaggtttacacagctgtagttgagccctacaatttcatactcaccacccacaccaacctggaacactgtgattgagccttgatggcatacaatgaggccgtctattacatgtggcgcagaaaccttgatattgaacgctcgagctatactaacctgaataggttaatatggc

SEQ ID NO: 34241 - DNA, 407 bp, Homo sapiens
ggcttggttttccacaactttggcgggggaactggttctgggttcacctcgctgctcatggaacggctctcagttgagtatggcaagaaatccaagctggagttctctatttacccggcgccccacgtttccacagttgtagtggagccctacaacttcatccttaccagccacaccaccctggagcactctgattgggccttcatgggagacaatgaggccctctatgacatctgacgcaaaaacctcgatattgagcgtccaacctatactaacctgaatagggtaataggggaaattgtgtgctccatcactgcttccctgagatttgatggagccctgaatggggacctgacagaattccagaccagcctggagccctatccccgcatgcactttcctctggc

SEQ ID NO: 34242 - DNA, 407 bp, Homo sapiens
ggggcattgatttatattttgaagcatacaggaaacttctcgtttcctcgtttagccccacccagatcacgtgaaagggcagctttaatggtgggttttatggaccacattatcagagagcactgtgcaagccaaatggttcaataatgaatgaaaattttgggtgtaaagagtaaatatgccctggctctttctaccaatgtttgctcctggttggaaagaaaccaaagatttaagacgggctgctcttccagactggctgtgcctgcctgtgcccagcaacctgtgcagccggcagtgtgcctggtgtcactccaggaggctgaggctgctgtgggccctctggaattgtgctcctcacaaagtttccccaaaaggttcttctaagcctttattgtccctggtaa

SEQ ID NO: 34243 - DNA, 426 bp, Homo sapiens
gggttcagcctcggtttcctcatctgttaaaaggagatgatcagaggagctgcctcaccaagttactgcagaatacacgatctaatacatgtaaaatgcttcacccagtgccaatgagactctacaatggtgggtattattatcgggaactgcaaagggcagagaacgggggttgggagcatccatacgccagctctaggttgcccaggaacgcaaagcggggctgagcggacaaaccagaggcaaccccaggactggacactctctatggcagctaagattctggaggctgggagtggggcatctcacagaccttctccatctaggagcacccactcccactcttttgacctcatttcctgtaaggtggtaccataaaagctttttgaggccagagcacaccaaatacctgtgactactttattt

SEQ ID NO: 34244 - DNA, 408 bp, Homo sapiens
ggggcgatcacccattgtagaagcaggtttcaggaaacttgtaaccgatcaaaacatctcaaagaattggagggtagacagcgcggcaacttccgggtatgagataaggaacccccctgactaccgagggcagagctggatgaagaggcacggcattcccatgagccacgttgcccggcctattaccaaagaagattttgccacattggagtatatactatgtatggatgaaagccatctgagagatttgaatataaaaagttatcgagttataacctgcaaagctaaaattgaactacttgggagctatgatccacaaaaacaacttattattgaagatccctattatgggaatgactctgactttgagacggcgtaccaccagtgcgtcaagtgctgcatagcgtt

SEQ ID NO: 34245 - DNA, 444 bp, Homo sapiens
gggcgcgagccgggctgtcgggtgtgttttgctctccagcctccgtcgtctctgcagcactccgggttctcctccagagcgctagtcccaggagctcggaatgttcgtggaacttaataacctgcttaacaccacccccgacagggcggagcaggggaaactgactctactctgtgatgccaagacagatgggagtttccttggacaccactttctctccttctatctcaaagggtgtcagcctgaccatggcgcgggagcgtgggcagcttgtgttccttgagggactcaagtctgcagtggacgtcgtcttccaggctcaaaaggagccacaccccctgcagtttctcagggaggctaatgctgggaacttgaaaccattgtttgagtttgtacgggaggccctgaagccagtaaacagtggagaggctcggtggacgtact

SEQ ID NO: 34246 - DNA, 418 bp, Homo sapiens
gggttcagcctcggtttcctcatctgtaaaaaggagatgatcagaggagctgcctcaccaagttactgcagaatacacgatctaatacatgtaaaatgcttcacccagtgccaatgagactctacaatggtgggtattattatcgggaactgcaaagggcagagaacgggggttgggagcatccatacgccagctctaggttgcccaggaacgcaaagcggggctgagcggacaaaccagaggcaaccccaggactggacactctctatggcagctaaaattctggaggctgggagtggggcatctcacagaccttctccatctaggagcacccactcccactcttttgacctcatttcctgtaaggtggtaccataaaagctttttgaggccagagcacaccaaatacctgtgactt

SEQ ID NO: 34247 - DNA, 408 bp, Homo sapiens
  misc_feature (1)...(408): n = A,T,C or G
ggtgctgccaataactatgcccgagggcactacaccattggcaaggagatcattgacctcgtgttggaccgaattcgcaagctggccgaccagtgcacgggtctccaaggcttcttgggtttccacagctttggtgggggaactggttctgggttcacctcgctgctcatggaacgtctctcaattgattatggcaagaagtccaagctggagttctctatttacccggcgccccaggtttccacagctgtagttgagccctacaacttcattctcaccacccacaccaccctggagcactctgattgtgccttcatggtagacaatgaggccatctatgacatctgtcgtagaaaccttgatattgagcgttcaacctatactaacctgaataggttaataggtcan

SEQ ID NO: 34248 - DNA, 413 bp, Homo sapiens
ggtgctgccaataactatgcccgagggcactacaccattggcaaggagatcattgacctcgtgttggaccgaattcgcaagctggccgaccagagcacgggtctccaaggcttcttggttttccacagctttggtgggggaactggttctgggttcacctcgctgctcatggaacgtctctcaattgattatggcaagaagtccaagctggagttctctatttacccggcgccccaggtttacacagctgtagttgagccctacaatttcattctcaccacccacaccaccctggagcactctgattgtgccttcatggtagacaatgaggccatctatgacatgtgtcgtagaaacctcgatattgaagcgccaacctatactaacctgaataggttaatatgtcaaaatgt

SEQ ID NO: 34249 - DNA, 499 bp, Homo sapiens
  misc_feature (1)...(499): n = A,T,C or G
aggtgaactgagaccatagaccatctctncgccaagctnggcacgaggcaaaaaattaagaagaggaaagctcaaaagaggataagagactgaattgcacctcataatggctgctgtgggcagagtctgggacatgacttttccccgccctgcccctctgttcagagcagctggaaagatgggatcagcaagattaaaaaacttttgttcggacaggcgcggtggtttacacctcgaatcccagcactttggtaggctgaggcggacagatcatgaggtcatgagttcaagaccagcctggccaatatggggaaaccccgtctctactaataatacaaaaattagccgggggttgtggctcaccctctattcccagctacttgggaggcagagacaggagaatctcctgaacccatgaggcagaggttgcagtgagctgagatcgtgccactgcactccagcctgggtgactaaacgagacttcatcttagaaacaaan

SEQ ID NO: 34250 - DNA, 476 bp, Homo sapiens
  misc_feature (1)...(476): n = A,T,C or G
gggaggggccnnnnnccattgaaatagactactatcatcgaaaccccaagcttggcacgaggggctgccaataactatgcccgagggcactacaccattggcaaagagatcattgacctcgtgttggaccgaattcgcaagctggccgaccacagcacgggtctccagaggcttcttggttttccacagctttggtgggggaactggatctgggtttacctcgctgctcatggaacgtctctcagttgattatggcaagaagtccaagctgaagttctctatttacccggcgccccacgttttcacagctgtatttgagccctacaacttcattctcaccacccacaccaccctggagcactgtgattgtgccttgatggtatacaatgaggccatgtcttacatgtgtcgtagaaacctcgatattgagcgtgcaacctatactaacctgaataggttaatatgtcaaattgtgt

SEQ ID NO: 34251 - DNA, 467 bp, Homo sapiens
  misc_feature (1)...(467): n = A,T,C or G
nggagggccngnngcatgagactgntacatctgaacccgatacgccagcttggcacgaggggctgccataactatgcccgagggcactacaccattggcaaggagatcattgacctcgtgttggaccgaattcgcaagctggccgaccagggcacggggctccaaggcttcttggttttccacagctttggagggggaactggctctgggttcacctcgctgctcatggaacgtctctcaaatgattatggcaagaagtccaagctggagttctctatttacccggcgccccaggtttccacagctagatttgagccctacaagttcatcctcaccacccacaccaccctggagcactctgattgtgccttcatgcgcgacaatgaggccatctatgacatgtgtcgtataaacctcgatattgagcgctcgacctatactaacctgaataggttaataggtcaaat

SEQ ID NO: 34252 - DNA, 472 bp, Homo sapiens
  misc_feature (1)...(472): n = A,T,C or G
aggagggcccgnngcatgatatcgactgctatcacgantaccccaagcttggcacgaggtgctgccaataactatgcccgagggcactacaccattggcaaggagatcattgacctcgggttggaccgaattcgcaagctggccgaccagtgcacgggtctccagggcttcttggttttccacagctttggtgggggaactggctctgggttcacctcgctgctcatggaacgtctctcacttgattatggcaagaagtccaagctggaggtgtatatttacccggcgccccaagtttccacagctgtagttgagccctacaactccattcttaccacccacaccaacctggagcactctgattgtgccttcatgggagacaatgaggccatctatgacatctgtcgtagaaacctccatattgagcggtcaacctatactaacctgaataggttaataggtcaaattgtgt

SEQ ID NO: 34253 - DNA, 464 bp, Homo sapiens
  misc_feature (1)...(464): n = A,T,C or G
ggagggcncgcgaatgaactaggacatcgaaccccatacgccagcttggcacgaggggctgccataactatgcccgagggcactacaccattggcaaggagatcattgacctcgtgttggaccgaattcgcaagctggccgaccagtgcacgggtctccagggcttcttggttttccacagctttggtgggggaactggttctgggttcacctcgctgctcatggaacgtctctcagttgattatggcaagaagtccaagctggagatctctatttacccggcgccccaagtttccacagctgtagttgagccctacaacttcatcctcaccacccacaccaccctggagcactctgattgtgccttcatggtagacaatgaggccatctattacatctgtcgtagaaacctcgatattagagcgccaacctatactaacctgaataggttaataggtcaaagt

SEQ ID NO: 34254 - DNA, 412 bp, Homo sapiens
ggtgctgccaataactatgcccgagggcactacaccattggcaaggagatcattgacctcgagttggaccgaattcgcaagctggccgaccagtgcacgggtctccaaggcttcttggttttccacagctttggtgggggaactggttctgggttcacctcgctgctcatggaacgtctcttaattgattatggcaagaagtccaagctggagttctctatttacccggcgccccaagtttacacagctgtagttgagccctacaatttcattctctccacccacaccaccctggaacactctgattgtgccttgatggcatacaatgaggccatgtattacatgtgtcgtagaaaccttgatattgagcgttcaacctatactaacctgaataggttaatatgtcaaaatg

SEQ ID NO: 34255 - DNA, 473 bp, Homo sapiens
  misc_feature (1)...(473): n = A,T,C or G
gagagggccngnngcatagaaatcgattatatctgantaccccaagcttggcacgaggggctgccaataactatgcccgagggcactacaccattggcaaggagatcattgacctcgtgttggaccgaattcgcaagctggccgaccactgcacgggtctccagggcttcttggttttccacagctttggtgggggaactggttctgggttcacctcgctgctcatggaacgtctcttaggtgattatggcaagaagtccaagctggagttctctatttacccggcgccccaggttttcacagctgtagttgagccctacaacttcattctcaccacccacaccaccctggagcactctgattgtgccttcatggtagacaatgaggccatctattacatctgtcgtagaaacctcgatattgagcgtccaacctatactaacctgaataggttaatagggcaaaatgagtcc

SEQ ID NO: 34256 - DNA, 479 bp, Homo sapiens
  misc_feature (1)...(479): n = A,T,C or G
ngaagggnccnnnnccattggaatagattgatatctgtaaccaccattacgccaagcttggcacgaggatggaatagttctgtatatagggcacaagtaaaggcattgtccaaagtttatttatttatttattaccctaagaatgctttgccataaccacatttaatgggaaaaacggcagtatcacagatgtaaattaactcaccagatttactgggcctgaactcattctcttcttgctatatgatttagcaagttctagaaggtctccaagacaataattacattggcacaatgtatacttcagtgctcacccgtaggcaaatctctttttaaaaaactctttggtgcacaagtaacacatttggccacaaaacaccaaagaattgtaggcagtggcccctattgagaagttttccggtagagttggaaatcagttgtgaatacattctttgctagttggagtgcttgtttactaa

SEQ ID NO: 34257 - DNA, 435 bp, Homo sapiens
  misc_feature (1)...(435): n = A,T,C or G
aactgatnnacagtcgtgatcgtcantccgccaagcttggcacgagggtttttctcaagtgactttgaaggtaatgcttttgcttaccatatttccaagatggccacgtctgtgcccttaagcaaatatttaatctctgacctgattttccctcatctgtgattacatcacagtttgaggatcatctgtgataacgtgaacattctgtgtatatagtaggtagtcaacagatgtaccctgtgaggctcatcttttattattctttgccacattctttatagtgcctttagcacaaataagatccagcatcttaaacagatttgcaatgagaaatattttgttttaggtaaaaatgttgtacatcagctctcagtaaccctataagacttatataatggtgcaacaagaaaactggctctgcaaaagaatgtgatn

SEQ ID NO: 34258 - DNA, 446 bp, Homo sapiens
aagatggaaaaattggactcaggcttaaatcaatagataatgggatttttgttcagctagtccaggctaattctccagcctcattggttggtctgagatttggggaccaagtacttcagatcaatggtgaaaactgtgcaggatggagctctgataaagcgcacaaggtgctcaaacaggcttttggagagaagattaccatgaccattcgtgacaggccctttgaacggacgattaccatgcataaggatagcactggacatgttggttttatctttaaaaatggaaaaataacatccatagtgaaagatagctctgcagccagaaatggtcttctcacggaacataacatctgtgaaatcaatggacagaatgtcattggattgaaggactctcaaaatgcagacatactgtcaacattctgggactgtaggtactattaccat

SEQ ID NO: 34259 - DNA, 425 bp, Homo sapiens
ggccaataagacagggcagctggtgagccgcttgacaactgacgtgcaggagtttaagtcatccttcaagcttgtcatctcccaggggctgcgaagctgcacccaggtggcaggctgcctggtgtccctgtccatgctgtcgacacgcctcacgctgctgctgatggtggccacaccagccctgatgggagtgggcaccctgatgggctcaggcctccgaaaattgtctcgccagtgtcaggagcagatcgccagggcaatgggcgtagcaaacgaggccctgggcaatgtgcggactgtgcgagccttcgccatggagcaacgggaagaggagcgctatggggcagagctggaagcctgccgctgccgggcagaagagctgggccgcggcatcgccttgttccaagggctttccaacatcgcct

SEQ ID NO: 34260 - DNA, 411 bp, Homo sapiens
ggtggcacgaggcttgtgtgtgcagccattggtccaaggtggttccagtagcgacttctgtccccctatccccaccctggtccccactttgcgcccccgggctccctgcctttggtgcacacaggatcctgcccgccccccttgccagagccagagaagggggttggggccattccaaggaggcaggactgaaaccctcaccagggttactccccaacatccttttgcctgaatcaccctctaagcgctttaaccacgggcagctgcctgttccccagacagtttttggtggggggggtccagggtcccccttgctgatacctccctcacccctctttttgtttatccatctgtgcctgttccttccacagcccaggcacacagaagcccaccttcttccccttaggaggg

SEQ ID NO: 34261 - DNA, 384 bp, Homo sapiens
gggtagacttggaacccacagtcattgatgaagttcgcactggcacctaccgccagctcttccaccctgagcaacttatcacaggcaaggaagatgctgccaataactatgcccgagggcactacaccattggcaaggagatcattgacctcgtgttggaccgaattcgcaagctggccgaccagtgcacgggtctccagggcttcttggttttccacagctttggtgggggaactggttctgggttcacctccctgctcatggaacgtctctcagttgattatggcaagaagtccaagctggagttctctatttacccggcgccccaggtttccacagctgtagttgagccctacaactccatcctcaccacccacaccaccc

SEQ ID NO: 34262 - DNA, 387 bp, Homo sapiens
gggcctgcttgtgcctcggttctctcatatgtcatatataggaggtgaggactccagctccacctgccccaggtgggtgtggtgatgatgaggaaagacaagaggcttgcaaggaccctgaagaggtcggagcatcatacagattcctttattagcccacattctgatgttccctggtgagacttgccccaagcaattgctagtaaatgggggttaatttcttctccacctccctactgaacaaaaaaagaaatgccagacttactaggagaatcgagttgctttgagtttcttttgttttgttttgttttgttttgttttaaggctccccttacacaccctcctttaagctttgggttttctctcttatagtttgttgacacatgg

SEQ ID NO: 34263 - DNA, 443 bp, Homo sapiens
  misc_feature (1)...(443): n = A,T,C or G
ntttgaaaacgtcttgaccatcgtaaaccctctcttggcaccaaggcccggagatgaatcctaccatctgctcggtgtttgaggcaaaattagtcttactgttctatgccaccaccttccgacgaggattccaggtggcagtacacgtgggcaacgtacgtcagacggcagtggtggaaaagatccatgccaaggacaaactgcggacaggcgagaaggcagtggtacgtttccgcttcctgaaacacccagagtacctgaaggtgggcgccaaactgctgttccgggagggtgtcaccaagggcatcggccatgtcactgatgtacaagccattacagcaggagaagcccaggccaacatgggcttctgaacccttcaggcagggacagttctattgctgtccctacaatatataaggtgacttctggccatgctgccctgc

SEQ ID NO: 34264 - DNA, 387 bp, Homo sapiens
ggcctcgtgccaagcttggcacgaggattgaattgcttatatgtggaagccggaatctagatttccaagcactagaagaaactacagaatatgacgggggctataccagggactctgttctgattagggagttctgggaaatcgttcattcatttacagatgaacagaaaagactcttcttgcagtttacaacgggcacagacagagcacctgtgggaggactaggaaaattaaagatgattatagccaaaaatggcccagacacagaaaggttacctacatctcatacttgctttaatgtgcttttacttccggaatactcaagcaaagaaaaacttaaagagagattgttgaaggccatcacgtatgccaaaggatttggcatgg

SEQ ID NO: 34265 - DNA, 58 bp, Homo sapiens
ggctggccgttcgcggccagcttcgccgccgtcaggttcgctttcgagttctgctcgg

SEQ ID NO: 34266 - DNA, 411 bp, Homo sapiens
ggaataattctgtatttaaaatatggaataattttaggtttacagaaaatttgcaaagacaggacagagagtttccatgtgccttggacccagttctctcttaatagtatcatcttttgtagccatggtacatttgtcagaactaagaaattaactttggcatattattagtaactaaactaaaggctttattggatttcaccagtttttcccccaatggcctcttcctgtgccaggacctagtcctggatatcacattgcattttgacttcatcatattgtttgatgaacaagtgttcctcatcttaatgtagttgaaagttttttttttaatgatttgaaattttggttccaatgtaaagacgcctacccttcctgtgttttcttctaaattctttaaaaatcgccttg

SEQ ID NO: 34267 - DNA, 481 bp, Homo sapiens
  misc_feature (1)...(481): n = A,T,C or G
nggagggccggnnnnnaattgaaaatcgactaccatgctgaacaccgaatactcgcagctaggcacgagggaagattctggaccctaacactggggagccagctcccgtgctgtcctccccacctcctgcagacgtctccaccttcctggcttttccctctccagagaagctgctgcgcctagggcccaagagctccgtgctgatagcccagcagactgacacgtctgaccccgagaagggggtctctgccttcctaaaggtgtcatctgtgttcaaggacgaagctactgtgaggatggcagtgcaggatgcagtagatgccctgatgcagaaggctttcaactcctcgtccttcaactccaacaccttcctcaccaggctcctcgtgcacatgggtctgctcaagagtgaagacaaggtcaaggccattgccaacctgtacggccccctgatggcgctgaaccacatggtgcagcagga

SEQ ID NO: 34268 - DNA, 471 bp, Homo sapiens
  misc_feature (1)...(471): n = A,T,C or G
aggacgggnnngggcatgagaccttgagancttctacgccaccttggacgaggcaccaagtggatcaataacaactgaagacttaggaaatttcattcgcagcgaagagccagaagttgttcaaagacttcctccagcatcctctgttagcacactagttttagcaccaagacctaaaccaagacaacgtttaacacctgtagataagaaggtatctttcgtggatatcatgccacatcagagtgatgtttcacaagaaggcagtgtagatgaggtaaaagagaatactgagaaaatgcagcaaggaaaagatgatgtgtctttactatctgaaggtcagcttgcagaacaaagcttggcatcttctgaagatgaaacagaaataacagaggacttggaaccagaagttgaagaggacatgtcagcttctgacagtgatgactgtattattccaggtcctatctccaagaa

SEQ ID NO: 34269 - DNA, 441 bp, Homo sapiens
tttgaaaacattatgaccatgattaaacctagcttggcacgaggcgaggccagagtgtaagtaaaggataaccaggactcgctgggagagatggactctgtcctcagcaacactccacagcagaaaggggtagcagggaccccttcttatcagcgggaaaaatgcatttacaacctttcatttaaccgaaaaacacagaccgctttaacctctttatttctgtcccccactgcatgaacatctatacaattttaaaaatacttcctcataggatgctttggcccttcatctatttaatcatagctacatacctattttttataagtagcagtacacattcaaaggggtattcctagctcaatgcttggtgttctagttcaacttttatcctgcagcaagtaagcctagataactctacacgatttggctgagtggctttgt

SEQ ID NO: 34270 - DNA, 444 bp, Homo sapiens
ggcaatcagagacctggctgatggagtattgttggtcactgtgccagagagaatgtggagtcctggaggccttgaactgattagtaggtatcccagccagaagcattgtgctcctttgcagctcactgggcagaactggtcccatgcacccccaccccccagccccaccaatcaaccacagtgctacgaaggagcactcccgtcatgtaccacaaagcagggagaacaggtcatagcactaatgaccgacaactaccactggggagaagtaggaccaggacgctctacaatcggatgcccagggaggggcttcctgtcatgggctggccaccagcaggaggtgtccagcgtgtgttctgaggcctgagctgggctcctgcagggcatctgtgctgttgctgctcatggagacctgaggcagtggcctggcctctgcctggagtg

SEQ ID NO: 34271 - DNA, 385 bp, Homo sapiens
ggctccaattaaaccaaatgctggggaagaatctgtcacgagtcttgacaaattgagatttgctgatggaagaagcataagaacatcggaactgcgactcagcatgcagaaggtaagagcctggactcgctctggagtgagcaggcgggctgcatacctggccctgcactggttttgtttttttaaaaacagatctagggggatgcaggtgcagctttgtgtggatgtactgggaggtgggggagtctgggcttttcatgtacccgtcacccaagtcgtgtgtgttgtactcagcaggtaattgctcatccccacccctcccgctttttggagcccccagtctgttagtccactccgtgtgtccatgtgtactcaccgttcagct

SEQ ID NO: 34272 - DNA, 473 bp, Homo sapiens
  misc_feature (1)...(473): n = A,T,C or G
ggagcggtccgggggcatagagcctgnggacatctgcacncncncngcncggcncnaggaacagaagggaggaaatatccatctataattggggatgtatctattgctcctttcagctttgtcagttttgcttcatgtactttgaagttttgctattgcttgcatgcagttttaggattgggatgacttggtcatgatttaacatattattatgaatatccctttttattcgtagtattaactcatgttctgggctatttttatgatattaatggagccaactagctttttatgcttaatatttgcacaacatatcatttttctttctttctaacttgtctgcttatttaatttaaaagtagtttcttatagacagcatatagttgtaactctttcgttattccagcacaggaatttcttcctgcatttctaattgcaggttttagactacatatttttaatgtaattatcta

SEQ ID NO: 34273 - DNA, 437 bp, Homo sapiens
tttgaaaacgcttgacctgattacgcctagcttggcacgaggctcttatgaatggatgttggttatacttttaatggacattaacattcctaataaagtattagcttcttaattcacttttatatgttttggaaagaaaattagtgaacttctctatgttaaaaatacgtactgcttgagtatcccctgtctgaaatgcttgggaccagaagtgtttcagcttttggatttttttgaattttggaatatttgcatagcataatgagatatcttgggaatgggacccaaatctaaacacaaaattcatttatgtttcatatacaccttatatacaataacctaaaggtgattttatatgatattttgagtaattttatgcatgaaacaaagttttgacaggcttttgaccgtgattcatcacatgagttcacgcatgg

SEQ ID NO: 34274 - DNA, 503 bp, Homo sapiens
  misc_feature (1)...(503): n = A,T,C or G
gtcttaaaaacccttgacatgactaccttgatttcgctcgaagcggcgtggtggctcaagcctgtaattccaacactttgggagaccaaggcaggaggatccctggagcacaagagttcaagaccaacctgggcaacatagtgagaccccatctatacaaagttttaaaaatcaaccaggcgcggtggtgggtgtctgcagtcccagctactaaggaggctgaagcggaatatcccttaatgccaccagttacaggatgccttgtgccaggcttgaatcactgaattccatcctggctgggacaaagagactgaatctcttttaaaaaaaaaaaaaaaaaaaaaattttccgccggcgggaaaaaaatttaccgggccttttttaaaccgggggggggaagaaaaangggntnntttttttttttttttttggaacttttctattttctgtccccaggttgggtgtttattcccacaaggggggttgtctctttgttttgtct

SEQ ID NO: 34275 - DNA, 445 bp, Homo sapiens
ggaggagatgagggtgatagtgcccagctctgggctctgctgtgagtcaagctgtgcaaacacaatgtcctgcctttggaaaagcagaacaaacttgctagggcataaagcatcctccattctgcctggctgtccatcctctcaacagccccatgaagaaggggctctccccattttatggacaagaagacagactcagctgggtcaagtggcttgcccaggatcacacaggtcagctgtggaagacccaggcccctggcttcagtctttgggtccagctgtctcctccaggcagtgctgccagtgtccaggcatatggcttggcaaagtgggagaacctctgcttggggtctcgattggagaaaggaatggcttcctctcccctgatgtgagccgtcccacggccatgttgccgtaagggggtgcacagcctgtccactagcct

SEQ ID NO: 34276 - DNA, 478 bp, Homo sapiens
  misc_feature (1)...(478): n = A,T,C or G
ggaggcgnnnnnnnnnctatgantatgactactcatctagaacactgcctactcggcacgagggtcatggatgccctcattctgaaaatggcagaaatgaaaaagtacactttagaaaataaagaggaaggatcactctcagatactgaagccgatgcagtctctggacaacttccagatcccacaacgaatcccagtgctggaaaggacgggccctcccttctggtggtggagcaggtccgggtggtggatctggaagggagcctgaaggtggtgtacccgtccaaggccgacctggccactgcccctccccacgtgactgtcgtgcgctgacgccagggccgcctgtccgcgtttgtttggccggttttggcgaggtttctatgcggcaatgctgaattatccgttagattttcaccccagtttttttggtggttttttttttggaaatggagactcgctcgtgccccaggctgaa

SEQ ID NO: 34277 - DNA, 386 bp, Homo sapiens
ggatttgttattggggagaaaatcttcagagctggatgctagtgattccagttctagcagcaatctttcacttgctaaggttaggccgagcagtgatctcaacaacagtactggccagtctcctcaccacaaagtgcagagaagtgtttcttcaagccaaaagcaaagacgctacagtgaccatgctggaccagctattccttctgttgtggcgtatccgaaaaggagtcagaccagcactgcagatagtgacctcaaagaagatggaatttcctcccggaaatcaagtggcagtgctgttggaggaaagggaattgctccagccagtcccatgcttgggaatgcaagtaatcctaataaggcggatattcctgaacgcaagaaaa

SEQ ID NO: 34278 - DNA, 385 bp, Homo sapiens
ggaaatctctagtaatttaacatatgatgctgaaaagccagttgttagttttctcacattaaaggaaaaatgaaaacttaaaagtaccaatatagtttcaaagaaatatctatgttattccaggttaaaagcacaaaaaaaggcaaaatgaaaacaattctttatagcttaaagatttaaatacttaacttgaccatcttattcattacataaaaataaagttaaaatagggtatcaagttgcagataaaaatatgaaatttcaactatagatgtgctgacatttatgatgaagttcagatatttctgcaaatgcatgaggattttaaaagagctgaatgttctggttaattagcttagtgatctgttcaaatttgcggtggtct

SEQ ID NO: 34279 - DNA, 502 bp, Homo sapiens
  misc_feature (1)...(502): n = A,T,C or G
nctgataacctcgaaatgcnacgttgattacgctcgaagcatctttcctgtggaagaacagcaggaagtaccaccagaaacaaatagaaaaacagatgatccagaacaaaaagcaaaagttaagaaaaagaagcctaaacttttaaataaatttgataagactattaaagctgaacttgatgctgcagaaaaactccgtaaaaggggaaaaattgaggaagcagtgaatgcatttaaagaactagtacgcaaataccctcagagtccacgagcaagatatgggaaggcgcagtgtgaggatgatttggctgagaagaggagaagtaatgaggtgctacgtggagccatcgagacctaccaagaggtggccagcctacctgatgtccctgcagacctgctgaagctgagtttgaagcgtcgctcagacaggcaacaatttctaggtcatatgagaggttccctgcttaccctgcagagattagttcaactatttcccaatgat

SEQ ID NO: 34280 - DNA, 444 bp, Homo sapiens
ggcatgtgcgtaagaatgaccgcctagccgtcaataagatgatcagcaaggtcacacggcatggccttaagtctccctttgcctactgcatgatgatccgggtggccagcaagcagctggaagaggaggatggcagccgtgacagcccactgtttgacttcatcgagagctgcttgcgcaacaagcacgagatggtggtgtatgaagccgcctcggccatcgtcaatctgccaggctgcagtgccaaagagctggccccggctgtgtcagtgctccagcttttctgcagctcacccaaggctgctctccgctatgctgctgttcgtaccctcaataaggttgccatgaagcatccgtcagctgtgacagcttgtaatctggatctggagaacctggtcacagattcaaaccgcagcattgccacgctggccatcaccaccctcc

SEQ ID NO: 34281 - DNA, 383 bp, Homo sapiens
ggagataagaagaaaatcgcggaacaaaacacaaagcttgctcctgagaccaaggctgtcattcattggattatggatattccttttgtgctttctgccaatctccatggaggagaccttgtggccaattatccatattatgagacgcggagtggtagtgcttacgaatacagcttctccccagatgacgccattttccaaagcttggcccgggcatactcttttttcaacccggccatgtctgaccccaatcggccaccatgtcgcaagaatgatgatgacagcagctttgtagagggaaccaccaacggtggtgcttggtacagcgtacctggagggatgcaagacttcaattaccttagcagcaactgttttgagatcac

SEQ ID NO: 34282 - DNA, 506 bp, Homo sapiens
ccttgatatccttttgaacatgactacgctgaacttcgcttgaggaaatcaatggttgcatttgaaattggttcaaggcttttgtgataatcccactcagtaatttatcttgagggactagttcgacagaaggaaacaatactgcacaaagatgctgattgcagagtctgtggtggtcacgaggtgagcgtacactggatgccatgtcccttgtggacagcagtttccctggtgagtgcacattcactagaatggcagcccgcacagtggcacagcagcacggggacccgggtgtgaaatgctcagcccacgtaatggcacagcccacgtaatagcgcgtgcagtgtgctgggagtctggggaattagaggtggattcaaatgtaatttagaaacttggaaatcattttaatagtgaaattatgggtgatttttgctttttaaaacttgtttaaatgctgtcatatggttaaaagataaaagcagtgggaggtcatgttttccgtt

SEQ ID NO: 34283 - DNA, 408 bp, Homo sapiens
ggctgatgggcagatgcccagtgacaagaccattggtggaggggacgactccttcaccaccttcttctgtgaaactggtgctggaaaacacgtaccccgggcagtttttgtggatctggagcctacggtcattgatgagatccgaaatggcccataccgacagctctttcacccagagcagctcatcactgggaaagaggatgctgccaacaactatgcccgtggtcactataccattggcaaggagatcattgacccagtgctggatcggatccgcaagctgtctgaccagtgcacaggacttcagggcttcctggtgttccacagctttggtgggggcactggctctggcttcacctcactcctgatggagcggctctctgttgactatggcaagaaatccaagct

SEQ ID NO: 34284 - DNA, 414 bp, Homo sapiens
ggcgcatcttcttttgcgtcgccagccgagccacatcgctgagacaccatggggaaggtgaaggtcggagtcaacggatttggtcgtattgggcgcctggtcaccaaggctgcttttaactctggtaaagcggatattgttgccatcaatgaccccttcattgacctcaactacatggtttacatgttccaatatgattccacccatggcaaattccatggcaccgtcaaggctgagaacgggaagcttgtcatcaatggaaatcccatcaccatcttccaggagcgagatccctccaaaatcaagtggggcgatgctggcgctgagtacgtcgtggagtccactggcgtcttcaccaccatggagaaggctggggctcatttgcaggggggagccaaaagggtcatcatctct

SEQ ID NO: 34285 - DNA, 439 bp, Homo sapiens
ggatggccactccctgcccccagcctggctggacagcaaggaatccacagcccacacgtgagctccctcctcacccccaggcagggaagcccctcctgccagtccctgtcccctttcagcccaccagtccctctctgctgccggtgatgggaggcctttctagacctggctctttctctcccgtctcagtggcttctctgaggtgctgtacacgcgcgttaacctgttcccttctctatccttccccgtggtactgagctcacgtggactcccagtgcgaaggggcccatgggttgggctgcaggcctggccgtgagcgggggctgcctgcacgctcccctagcctactcttgtgtttaggggatggtgggaacatatcccagtgcccttgcctcataatagatgtggtgactctcccggtagaccctatcaagggtcc

SEQ ID NO: 34286 - DNA, 500 bp, Homo sapiens
  misc_feature (1)...(500): n = A,T,C or G
ntcctgataccccttgacctgactactctgatatcgtcggagctccatcgacccgaccttgagaaaaacgacaattttggctccagactcctgacttcacaccgaccaaattcaaggagagagcccctgagcagctcatagccctggagagcagttttgcacaaaaccctctttctcttgatgaggaactggaccgcctgagaagtgaaaccaaaatgacccgacgagaaattgatagctggttttcagagagacggaaaaaagtgaatgctgaggagaccaagaaggctgaggagaatgcctctcaggaggaaaaggaggctgctgaggatgagggtggagaaaaggatttggccagcgagctaagggtctctggtgaaaatggctctctggaaatgcccagcagccatatcttggcagagcgcaaagtcagccccattaaaatcaacctgaagaacctgagggtcactgaagccaatggcaggaacgagattccaggg

SEQ ID NO: 34287 - DNA, 449 bp, Homo sapiens
  misc_feature (1)...(449): n = A,T,C or G
nccaagggcccttctgatccctcagtgaatctngcaacacganacgccagcttggcacgaggagcggaggcccacgaggagggggaataaagaaggtggaggatcctggctaccactctgaatccgataccgcttgtcttagacctcagcgacagaaaaagggaagggggtctcatcccccttcctcctctcctccctgtcctgagccttatccatggccgaggcaggggctgggctgagcgagaccgtcactgagacaacggttaccgtgacaaccgagcccgagaaccggagccttaccatcaaacttcggaaacggaagccagagaaaaaggtagaatggacaagtgacactgtggacaatgaacacatgggccgccgctcatccaaatgctgctgtatttatgagaaacctcgggcctttggcgagagctccacggaaagtgatg

SEQ ID NO: 34288 - DNA, 383 bp, Homo sapiens
gggggtgtgaaacaactaattgtcggtgttaacaaaatggattccactgagccaccctacagccagaagagatatgaggaaattgttaaggaagtcagcacttacattaagaaaattggctacaaccccgacacagtagcatttgtgccaatttctggttggaatggtgacaacatgctggagccaagtgctaacatgccttggttcaagggatggaaagtcacccgtaaggatggcaatgccagtggaaccacgctgcttgaggctctggactgcatcctaccaccaactcgtccaactgacaagcccttgcgcctgcctctccaggatgtctacaaaattggtggtattggtactgttcctgttggccgagtggagactgg

SEQ ID NO: 34289 - DNA, 425 bp, Homo sapiens
  misc_feature (1)...(425): n = A,T,C or G
ggcatgggaatgaggctgtgggacgagaactgctcattttgttggcccagaacctatgccacgaataccagagggggaacgagacaattgtcaacctgatccacagaacccgcatttacatcatgccttccctgaacccagatggctttgagaaggcagcgccttagcctggtgaactcaaggactggtttgtgggtcgaagcaatgcccatggaataaatctgaaccgtaactttccaaaactggataggatagtgtacgggaatgataaagaaggcggtccaaataatcatctgttgaaaaaaatgaagaaaattgcggatcaaaacacaaaggttgctcctgagaccaaggctcgcattcattggattatggatattacttttgcgctttctgccaatctccatggaggagaccttgcggcn

SEQ ID NO: 34290 - DNA, 418 bp, Homo sapiens
ggtctttctacaatgtgaccaacaagtcccacatctttactttcacccacaatttctctggcccccttcgccctttctttgaaccttgccttcatgatggaggaaaaaacacagcacctctagtcatttgttcagaactacacaaatcagaggaatcaattgtccccaggccagaagggaaaggccatgctaatggagatgtgtccctcaaggtgaactcttctttactacccccgaaggccccagagctgaaggatataaacctgtccttgccccctgaccttggcccaccccttcaggagctcaaggctccttctttttagggatatgccacattacctgctcccatcaccatccagcccagcaccctggacttcagtcgcctggcccaaccccatgattatggaacgtctcttct

SEQ ID NO: 34291 - DNA, 493 bp, Homo sapiens
  misc_feature (1)...(493): n = A,T,C or G
cctcgataacagttgacctgctacgccattgagacgatggttttccttgtgacagagacaacgaatacaattgtttcttttccggatgaacaaggatctgttttgcaaatgtttgtaagatattatgacatttccaagattttctttgcattctggaaagcaggaggtaaacatttgtagtcattaaggtaaagtctgttgataaaccatcttctgtttactgacaggtaaattgtaactttccctagcttttgaaatgagtaacttctatacaccacaaagtgaggcacagcctgggaaaggtggctagacaaggggcaagccaggctttctagcttctggaaggatcgagtggcctatcangcatctaagataaagaaagcaatgattcggaagtccagtagggcccatttgaccggtagcaaaatcgaaagcacgaaatagatcaaggttagggagccagacaaagcccttggaagagaggcagattgca

SEQ ID NO: 34292 - DNA, 427 bp, Homo sapiens
gggggaggagggactggggctcctggattcctgggtctgtgggaagagaggagtgtctgagggaggaggggctggggacaaacttccaggtctctagccttcctggcaacgccccccgaggccggacttccaggatccagcctctattgaggatttgatgcgacggcctcacggggctttggaggtgaaagaggcccagagtagagagagagagagaccgacgtacacgggatggctacgggaacgcgctatgccgggaaggtggtggtcgtgaccgggggcgggcgcggcatcggagctgggatcgtgcgcgccttcgtggacagcggggcccgagtggttatctgcgacaaggatgagtctgggggccgggccctggagcaagagctccctggagctgtctttatcctctgtgatgtgactcaag

SEQ ID NO: 34293 - DNA, 411 bp, Homo sapiens
  misc_feature (1)...(411): n = A,T,C or G
gggcctcagcctcccaagtagccggaattacaggcatgtgccaccatgctgggctaatttttgtatttttagtggagacggtgtttcaccatgttggccaggctgttcttgaactcctggcctcaagtgacccgcccacattggcctcccaaagtgctgggattacaggcgtgagcccccgtgcccagcaaggattgctggtttaattcttgtatcttcgttgcttctttggtctttgcttaaacaaaacaataaagcttaatagttggggagaatgctgttaccagtgtcctctaggaaggctgttagcatatggctctactgagcagcagtgccatctggtgcctgagatcatgtgcttcaggcagttgtcacactgcatctacagccaagcatcacagaaacacttcn

SEQ ID NO: 34294 - DNA, 452 bp, Homo sapiens
  misc_feature (1)...(452): n = A,T,C or G
nttgacaccctgaggacctgagacgccacgcttggcacgaggttcagttctcgtggtccataggggcagagatgtcaaagtgaaggttgcctgagtgaagggagagttcccctataaaaggcctaaaattgatttggggctcagccatcaaggggctggtgttgctcctgtcccagacaaggaagcccctctttacatcagccatattaggggaacggttgtcagctccccaaatgcctactggatcctacagccatacaggaaaacagacggacacagccctttccttaaagagccctggggtcctgtcctgcaggatgctgcataggaatgggcagagatgtcctggatgggaacatggtcctggaggtgccctacctgcatcctgctgcacccccacccacgacactcgagtgcaagatcgcctcactcctaaccctgactttattccc

SEQ ID NO: 34295 - DNA, 423 bp, Homo sapiens
ggcgaccgcctaatagtcgcgctgtgagaagcaacaacctatcctcttcgtctccggcatcaactcggcagtcgcgaagcagcaaccatgcgtgagtgcatctccatccacgttggccaggctggtgtccagattggcaatgcctgctgggagctctactgcctggaacacggcatccaacccgatggccagatgccaagtgacaagaccattgggggaggagatgatttcttcaacaccttcttcaccgagacgggggctggcaagcatgtgccccgggcagtgtttgtaaacttggaacccacagtcattgatgaagatcgcactggcacctaccgacagctcttccaccctgagcaacttatgacaggcgaggaagatgctgccaatatctatgcccgagggcactacaccattggcaag

SEQ ID NO: 34296 - DNA, 413 bp, Homo sapiens
ggatacggacaggcgctctgctcatcaagagggcagttatttcctgttaacttacggggtgtcagggaataaggtgaaacgaaattcccccaaggtctgtgctggtctgaactgccctggccatccagctgtgcccaccagatgtcccgctgagacagttcacaaaaacacaagccactgccttttttttttctgctttcaccatataaaaatgtaacggcaagggttggtattttgtcgccctcctgcataaaggtgggcaaacctccactcaggggaacgaatgttctctctgagacggacactgtatacttctgtgaccgcacaacatactgaattttcactctatctttttttttaaaactcaaaactttttggttgtatttaaattgacaaatcttacatattggggg

SEQ ID NO: 34297 - DNA, 467 bp, Homo sapiens
  misc_feature (1)...(467): n = A,T,C or G
cgccaagggccggntttgaacctctttgacatcttaacctcactacgccaaacttgggacgaggaagcgtaccctctctttcagcacccaggccagtattgagatcgattctctctatgaaggaatcgactgggataccggcattacccgtgcccgatttgaagaactgaatgctgacctgttccgtggcaccctggacccagtagagaaagcccttcgagatgccaaactagacaagtcacagattcatgatattgtcctggttggtggttctactcgtatccccaagattcagaagcttctccaagacttcttcaatggaaaagaactgaataagagcatcaaccctgatgaagctgttgcttatggtgcagctgtccaggcagccatcttgtctggagacaagtctgagaatgttcaagatttgctgctcttggatgtcactcctctttcccttggtattgaag

SEQ ID NO: 34298 - DNA, 488 bp, Homo sapiens
  misc_feature (1)...(488): n = A,T,C or G
aggaggcccngngngccccatgatnnccntactgaccaccattacgccagcttggcacgaggattttgtaaataaatcggattccttgtgtcctttgtgctagtgtaacccgggactggaatgtaaagtgaagttcggagctctgagcacgggctcttcccgccgggtcctccctccccagaccccagagggagaggcccaccccgcccagccccgccccagcccctgctcaggtctgagtatggctgggagtcgggggccacaggcctctagctgtgctgctcaagagactggatcagggtagctacaagtggccgggccttgcctttgggattctacctgttcctaatttggtgtggggtgcggggtccctggcccctttttcacactcctcctccgacagcagctccctgggcagtggcctggtctcaccgtgtgcagccttgtggtttatgcttaaatgtacattttcctgctggtaaaaggag

SEQ ID NO: 34299 - DNA, 469 bp, Homo sapiens
aatgaactgaatacagttatgaccatcattacggccagcttggcacgaggattgcggccttgggtctggaacactgcaataaaacaagtatcgttataaaacgagtcacataaatctttggtttcacagggcatataaaaattatattcacggcatactgtagtctattaagtgtgcaatagcattatgtctaatagatactttaattaaaaaatattttattgctgtaaaatgccaacaatcgtttgagccttcagtgatttgtaatcttttttctttgatgagacggagtctcgctctgtcatccggtctataatgcaatggtgtgatcatggctcgctgcatttttgaattcctgggcttaggtgatcctcctgcctcagccttcctattgtcacttggagagggtcgtgactgcaagatgtccagattcttggcgttttgaataaagaattggacaaaacgccct

SEQ ID NO: 34300 - DNA, 394 bp, Homo sapiens
  misc_feature (1)...(394): n = A,T,C or G
gaccgcctcggcctcccaaagtgctgggattacaggcgttagccactgtgcccaggcccacctgtgctcttaaccaaatatttggtatttaccttttaaaacatttatgaaaaatttaaacctccaggagtgtaaagcttctgttcactgggtttaaaaagtcatttttagaacaggatggccttattgccaagcactatacgactcccaagcttccatttgaggctaaaggtaggtctaagtgaatacacagtgtgtggatctgatttagacctgagcttcccatgctgctctgcgcttgggactggtctgcatccggaggctctggtggcaggccttgattaatggaactctctaggctgtaaagtgctgggaaatcccaaataggagattn

SEQ ID NO: 34301 - DNA, 404 bp, Homo sapiens
gggcttgtcggggacggtaaccgggacccggtgtctgctcctgtcgccttcgcctcctaatccctagccactatgcgtgagtgcatctccatccacgttggccaggctggtgtccagattggcaatgcctgctgggagctctactgcctggaacacggcatccagcccgatggccagatgccaagtgacaagaccattgggggaggagatgactccttcaacaccttcttcagtgagacgggcgctggcaagcacgtgccccgggctgtgtttgtagacttggaacccacagtcattgatgaagttcgcactggcacctaccgccagctcttccaccctgagcagctcatcacaggcaaggaagatgctgccaataactatgcccgagggcactacaccattgg

SEQ ID NO: 34302 - DNA, 454 bp, Homo sapiens
  misc_feature (1)...(454): n = A,T,C or G
atttgaanacttgatggnacctcaanacgccaagcttggcacgaggccagaggcttacaggtccaggtggagaggccgggctggccagggcttcggcctccggcgtcgggaaatggcggcggggggcaggatggaggacggttccttggatatcacccagagtattgaagacgacccacttctggatgcccagcttctcccacaccactcattacaagctcactttagaccccgattccatcctcttcctacagtcatcatagtgaatcttctgtgggttattcatctcgtggttgttgttttagcatttttaacaggtgtgctttgttcttatcctaatccaaatgaggacaagtgcccaggaaattacacaaacccattgaaagttcagacgggtataatccttgggaaaggtattttgtggattctccatttactccttgaatgctacatc

SEQ ID NO: 34303 - DNA, 406 bp, Homo sapiens
gggccacatctgccagagcctggagtctgcgaaggccgggacccggttccccggcccacagtgggggtgtgcaaacccgagagaactgggaagtgccgtcagaagcgataactgacgacgtctaatgtctatctgaccgcagtcgctgaaacctctacaacttaattgaccgtaactgccagagccctgccctgaattcctgtccttactccctctttaagattgcgtacccactgcagagtgctgaagacggggtagccacgaggttgcaaattcgtgaagaatcaacatcatgtttggcagctgagtattggagccaggagcctgccatgaggttttgagaacagagtgctgttttagagctggcagcagcatctcagcccaagagaaggttatattcccagag

SEQ ID NO: 34304 - DNA, 400 bp, Homo sapiens
gggctgaggtcgtctgagcctgcgacagcctggacagcaactcaggatggcatcaggcagggcacgctgcacccgaaaactccggaactgggtggtggagcaagtggagagtgggcagtttcccggagtgtgctgggatgatacagctaagaccatgttccggattccctggaaacatgcaggcaagcaggacttccgggaggaccaggatgctgccttcttcaaggcctgggcaatatttaagggaaagtataaggagggggacacaggaggtccagctgtctggaagactcgcctgcgctgtgcactcaacaagagttctgaatttaaggaggttcctgagaggggccgcatggatgttgctgagccctacaaggtgtatcagttgctgccaccaggg

SEQ ID NO: 34305 - DNA, 486 bp, Homo sapiens
  misc_feature (1)...(486): n = A,T,C or G
aggcggttnnnnnnnaattgaaatcgatnagcagtcatcaccatgcactacgccaagcttaggccgaggcataattacccccatactccttacactattcctcatcacccaactaaaaatattaaacacacacacacacacacacacacacacacactcacacattttttggggccagtctttaacacatcacaaatgcttgtatatttctcttttggcaaagagatcacagtcctgaactcagaactaatatttgaagacaatattttatttatatttggagatatctctttatgggaaaagatatctacttatagtttggtagtgatataatatttcctttaacaataatgtatttaagtgtaagttaaatgaattaacgtaagaaaaataacaaataacatataaattaaatgtagatttgctagtgcaattacaggtagctacgtgactaactgaaatttgggaaacacaattctaagcttg

SEQ ID NO: 34306 - DNA, 423 bp, Homo sapiens
ggcagaaggccatgccaaagaaggacagggtattaaaaccgacattcccaggtacatcattagccaactgggactcaataaggatcccttggaagaaatggctcatttgggaaactacgatagtgggacagcagaaacaccagaaacagatgaatcagtgagtagctctaatgcctccctgaaacttcgaaggaaacctcgggaaagtgattttgaaacgattaaattgattagcaatggagcctatggggcagtctactttgttcggcataaagaatcccggcagaggtttgccatgaagaagattaataaacagaacctcatccttcgaaaccagatccagcaggcctttgtggagcgggatatcctgacttttgcagaaaacccctttgttgtcagcatgtattgctcctttgaaacaag

SEQ ID NO: 34307 - DNA, 417 bp, Homo sapiens
ggtgcctcgacaaaacagccgttccatgctggggaaccacctttgtcccagtcagcttggactcataagctggaatggctgagtcacacaaacagctaaggtagcagcccatcttcccctttctgagcactctatcttagggagaaatcagaactctgttcatagaatatgggtggggctggctggaggcccctgctgggaagactcatccagcgaggataatggattgggtttttatttgaagaagcagcctggccatatcttggtaaaacagctgtgctgtgctgtgctgtggggtcccttcctcattcggattgtttggattctccaaagccaacgtccaagcagcaaagatagtggcctggccctcccccaggggctctgacccatctcagtcaggtgctaggctgttgctgg

SEQ ID NO: 34308 - DNA, 466 bp, Homo sapiens
  misc_feature (1)...(466): n = A,T,C or G
aagcgtnnnnnnactgaatcgtgtcattgctacgccatcttggacgagaactttagaccgcaagtactatgtgactatcattgatgccccaggacacagagactttatcaaaaacatgattacagggacatctcaggctgactgtgctgtcctgattgttgctgctggtgttggtgaatttgaagctggtatctccaagaatgggcagacccgagagcatgcccttctggcttacacactgggtgtgaaacaactaattgtcggagttaacaaaatggattccactgagccaccctacagccagaagagatatgaggaaattgttaaggaagtcagcacttacattaagaaaattggctacaaccccgacacagtagcatttgtgccaatttctggttggaatggtgacaacatgctggagccaagtgctaacatgccttggttcaagggatggaaagtcacccgn

SEQ ID NO: 34309 - DNA, 485 bp, Homo sapiens
  misc_feature (1)...(485): n = A,T,C or G
tgtnnacgnagcnnaggggccccgnngtttggggacccttgaggaatcgtcgtaaccaccattacgccaagcttgggacgaagcacaggtgtcgtgaaaactacccctaaaagccaaaatgggaaaggaaaagactcatatcaacattgtcggcattggacacgtaaattcgggcaagtccaccactactggccatctgatctataaatgcgggggcatcgacaaaagaaccattgaaaaatttgagaaggaggctgctgagatgggaaagggctccttcaagtatgcctgggtcttggataaactgaaagctgagcgtgaacgtggtatcaccattgatatctccttgtggaaatttgagaccagcaagtactatgtgactatcattgatgccccaggacacagagactttatcaaaaacatgattacagggacatctcangctgactgtgctgtcctgattgttgctgctggtgttggagaat

SEQ ID NO: 34310 - DNA, 406 bp, Homo sapiens
ggcatctgaagtgctggggaccaggggaccaggaggcctcagcgcagttggcacccctccctctgtacccccagaagacgggcctggatgcattcccagtcctctgctcctgcccagggctttggtgctcaacagagagcctcctccacccctggggccaggctaaacgggtctcagaagggaagccacatgcgctgagcaaatcccagcacagcacagcacagcagctccagtgagggaccgggagccaggccacctccccgggggtcctgggtccccattttttaactgggtgacactaggcaagttacttcacctcttgtgtcccgacctcctcatctgtaaaatggagctcacaacagtactgacctcaagggggagactctgccgttcctaaatgagagcc

SEQ ID NO: 34311 - DNA, 458 bp, Homo sapiens
  misc_feature (1)...(458): n = A,T,C or G
ntttgaaaccagttatgaccatcgattacgccagcttggcacgagggacaagtcctgtgtctacctgcgtcagcctgaaaatggaaatattggctgttgactcttgtcatttagtgacttcatccccctcccctcagtctgatcttgtctaagtagaatccaggcgttagttggaatcatatcataagtatccatgaagaaaacgtcatgatctgcctcggagtggggagaaacaggccctccttgtccttgtgcagcccccacttttgtcctggctgtgggtggccatccattttgagcacctctgccaggctgcagacctggaggcgaagggagtgtggaagaggagggtgtaagggtcgacgcgtgctgaatgggaggtgcaggtcctcggtgcgttggcagaagaggcttctggagtttcgaggccatacctcctttcaagagctttggatttg

SEQ ID NO: 34312 - DNA, 479 bp, Homo sapiens
  misc_feature (1)...(479): n = A,T,C or G
agcgcttnnnnnnactgaaatcgatagcgttatcaccatgcctacgccgagcttggcacgaggcataagtgcgcaaagtgtcactcggcttacaaagggagacacaagctcataatggtccatgtataaaagtaataactttattgggtagagatattcttacaagatctagcacctctgccagtgcacagataggactgttttaaatgatttgggaacttttggttgcctgcagttgtgaacagagaacttctctacagagaaacaaaccactaaaagcaatatgaccgagttgagatgtggtttccaatgagcaattggtgaatttaagcaacctggatgtgcatatgtggaggctcccgtctcactgtttgatcaaacttcttttatgtagtcacgtaaacttgattttttctgctgtgaaaatgaaaaaataaagcaatatgacaaaaagtttaaaaatgcataaaaaatacgac

SEQ ID NO: 34313 - DNA, 421 bp, Homo sapiens
gggctgccaataactatgcccgagggcactacaccattggcaaggagatcattgacctcgtgttggaccgaattcgcaagctggccgaccagtgcacgggtctccagggcttcttggttttccacagctttggtgggggaactggttctgggttcacctccctgctcatggaacgtctctcagttgattatggcaagaagtccaagctggagttctctatttacccggcgccccaggtttccacagctgtagttgagccctacaactccattctcaccacccacaccaccctggagcactctgattgtgccttcatggtagacaatgaggccatctatgacatctgtcgtagaaacctcgatattgagcgtccaacctatactaacctgaataggttaataggtcaaattgtgtcctccat

SEQ ID NO: 34314 - DNA, 398 bp, Homo sapiens
  misc_feature (1)...(398): n = A,T,C or G
ggctcaaatgcaccttcacatctcccaagactccagagcatgagggccgttactatgaatgtgatggccttcctttcatggaaattgggtctgtggcccataagttttaccttttaaacatccggctgcctgtgaatgagaagaagaaaatcaatgtgggaattggggagataaaggatatccggttggtggggatccaccaaaatggaggcttcaccaaggtgtggtttgccatgaagaccttccttacgcccagcatcttcatcattatggggggggattggaggaggatcaccatgatgtcccgacccccaatgcttctggaaaaagtcatctttgcccttgggatttccatgacctttatcaatatcccagtggaatggttttccatcgggttn

SEQ ID NO: 34315 - DNA, 419 bp, Homo sapiens
ggggggtaatatggccatcttttataaaaaaaagtgtcataacggcttttttaataaagaattttccatctgactttatttccaaatacactttcttttttaaaaaaccaatacactttctttgaggatgacagtattatgaaaaccaattatacaaaaaatactacatctagtctaggggtagacttatttatttttggcaacatacattatttggcactaattacacagcaactattttgtaactaacatgaaaccacacaactgtaactctgccacagctgcatgaaatagggcttttctggttgaccccattttcaaaaaactgcccaccccacagctatgccaacaaaaaatgttacggagtaaagccctgaagtggtgactcaccagagtaccttgcagctgacagataatag

SEQ ID NO: 34316 - DNA, 461 bp, Homo sapiens
  misc_feature (1)...(461): n = A,T,C or G
ggaaactgccccttgannaccgctatttagatgaccactccaagcttggcacgaggtgcacctgagcaagcctgcctcttagccaaacaagccttcgatgatgccatagctgagctggacacactaaacgaggattcctataaggactccacgctgatcatgcagttgctgcgagacaacctcaccctctggacgagcgaccagcaggatgaagaagcaggagaaggcaactgaagatccttcaggtcccctggcccttccttcacccaccacccccatcatcaccgattcttccttgccacaatcactaaatatctagtgctaaacctatctgtattggcagcacagctactcagatctgcactcctgtctcttgggaagcagtttcagataaatcatgggcattgctggactgatggttgctttgagcccacaggagctccctttttgaattgtgtgga

SEQ ID NO: 34317 - DNA, 417 bp, Homo sapiens
ggcagtgagatcagtcagctccgagtggctcccgtgtcgtaacagcaggagcatggccgcaacttcccaggccgaggaagggcccccggctcggcctcttgagagccccacccctgaactggccccagctcctcttcctgcctctctcatggcttgggctggagtgggctctctggacctgaccagactgtgggtccctgcgtctcctgcccactctgaccgggcttcctccctccacgcttagggtctgtcccgggtactcagtcagcccagtgggatcttacccacttccctgcaaggtgcacctgccccaggctcaggctgcccagcggctcttcctggacagtgagagcagggctgggcgcctctgtcctggcccgggagccgcaggggcccctcctccagagcctgggcgca

SEQ ID NO: 34318 - DNA, 398 bp, Homo sapiens
ggtgctcctccaagtcaaggcggaacatccaggctggggcagctggcccttgtgaactaatgtaacagacactgaaggaggaaatggaagcccgggattctgcctcaaagggcttcaagtcccaggaatttcattccctggcactgcaggcagcactgtctcaacctaaagttgcatttgcagcctcttctattaagctgtgagcaggagaagagggaaaaggtgtatgactagaggcaaaaggacaactaaatggtcttaccacccagaaagaggacttttcgtatatgaatgacagcggttgcttgtgacagagcagacaccaatgagcaacaaagagagtgtaaaaatcagggacatcagagagaccctcagggacatcaaaagagagcccctct

SEQ ID NO: 34319 - DNA, 455 bp, Homo sapiens
ggggtcccctgataacgttagtagatgaccactccaagcttggcacgaggtggcgccctccaggaagttcttcgttgggggaaactggaagatgaacgggcggaagcagagtctgggggagctcatcggcactctgaacgcggccaaggtgccggccgacaccgaggtggtttgtgctccccctattgcctatatcgacttcgcccggcagaagctagatcccaagattgctgtggctgcgcagaactgctacaaagtgactaatggggcttttactggggagatcagccctggcatgatcaaagactgcggagccacgtgggtggtcctggggcactcacagagaaggcatgtctttggggagtcagatgagctgattgggcagaaagtggcccatgctctggcagagggactcggagtaatcgcctgcattggggagaagctagatgaaaggg

SEQ ID NO: 34320 - DNA, 476 bp, Homo sapiens
  misc_feature (1)...(476): n = A,T,C or G
nttgacaccgnnagttcaaaactgaataggcttgngaacnacgattaaaattnntaagaggtaccaggagccattcattaaattagcagcaactcccatgctggttttagtgtaatcactagatgcataaattgctgggggtcttatatgtaaaacaaccatttgaaaagcactcttgcgatgtgtcaggattcataaaaatcttcatactttttgaccctgaaatctcacacctgggaattgatccaaataaaataataacctgccccccttccaaaaaacaaacctttaagcccaaagatatccacagagttatttcaaatagtgaaaaattagaaataacctaaatgactaatcaggggagtaattaaaatgttcatatgtcccctgagagaatacaataattaaaaatggtaatagagactgcaattgaaaatgtaataagggtaatttttttaaagcaagctttcatattg

SEQ ID NO: 34321 - DNA, 426 bp, Homo sapiens
ggtgataatctgtctaatattgtcagtgaggtgttaaagtctcccactattatcgtgtgagagtctaagtctcattgaaggtctctaagaacttggtttatgaatctgagtgctcctgtgttgggtacatttgtatttaggatagttaacttttcttgttaaattgaaccctttaccattatgtaatacccttcttttttttttttttttaaaaactttgggggttaaaaggcggttttatcaaaaattaggagcccccccccggctttttttggtttcccattggctgggaaaatttttccccctcctttttttttgaccccaggggggcaattgcaggaaaggggccttttgaaaacagcatcccaggggatgggggttttttataaaaaaacttgcccctctggggcttttaatggggccatg

SEQ ID NO: 34322 - DNA, 458 bp, Homo sapiens
acgaaaaccactgataacgctatgaccttgattacccctagcttggcacgagggggggagccccctaccaggtgacgggctgtgccctgggtttcttccttcagatctacctattggatgtggctcaagtgggccctttctctgcctccatcatcctgtttgtgggccgagcctgggatgccatcacagaccccctggtgggcctctgcatcagcaaatccccctggacctgcctgggtcgccttatgccctggatcatcttctccacgcccctggccgtcattgcctacttcctcatctggttcgtgcccgacttcccacacggccagacctattggtacctgcttttctattgcctctttgaaacaatggtcatgtgtttccatgttccctactcggctctcaccatgttcatcagcaccgagcagactgagcgggattctgccaccgcctatcgg

SEQ ID NO: 34323 - DNA, 400 bp, Homo sapiens
actagggtggaatgaagagtgagaaagctgtctaggtgcctgtccaattagggcagtaggaagaatcctgatggccaggcagctcttatctcaggtggacatggactgcagggtccacatgcgacccatcggcctgacgtgggtgctgcaactgaccttggcatggatcctgctagaagcctgtggagggagccgcccactccaagccaggtcccagcaacaccatgggctggcagctgatctgggcaaaggcaagctgcacctggcaggaccttgttgtccctcatagatggacacaacagagacatcgggccctggaaaccatccagaacgctgtggagtgccgagccctgaatgcgaatccttcctggaacacctccaacgtgcccttcgcagtcgc

SEQ ID NO: 34324 - DNA, 467 bp, Homo sapiens
  misc_feature (1)...(467): n = A,T,C or G
ggcagtaattttgatacccctnactgangaacntctgagctgcttacgaccagcttggcacgaggnggagatgcattgctccttctctgaaaggaatcccaaagccttgtgtctacagagaacctggagttcctgaacctgatgctgactagtgaggaaagatttttgttgttatttcttacaggcacaaaatgatggacccaatgcacacaaaacaaccctagagtgttgttgagaactgtgctcaaaatttgaagaatgaacaaattgaactctttgaatgacaaagagtagacatttctcttactgcaaatgtcatcagaactttttggtttgcagatgacaaaaattcaactcagactagtttagttaaatgagggtggggaatattgttcatattgtggcacaagcaaaagggtgtctgagccctcaaagtgaggggaaaccagggcctgagccaagctaga

SEQ ID NO: 34325 - DNA, 420 bp, Homo sapiens
gggtaccactgtgaaatacgttttaaatttttacttgcccttcccctcaggtcctgagtgaggcagtggctctctggcggtgctcgcatttaaataggagtgtgtaggcttacagcaatgaaacatctaggagcttttaactttggatctatacctgggtgtgacatttccttggtgttctctggctgcctttctggctctgcagccctgagggcacttgtgtgtgtgtgtgttctctggagaagggaagtgattatggcagagaggctcctttagattctcctcttaaacctctttggaacatgtttgaattccagaagtgaatgaacttcattcattctctcgtccagatttcaaaagggactaaagtgaacggaggctttttcactccctggcatgctaagagccacattccctagg

SEQ ID NO: 34326 - DNA, 412 bp, Homo sapiens
ggggcgggagggagggctgaagggggtaagtcaattgcctttacggtttttcaccacccctggttcactggaaaggctcaggaaatggcaggtgaatcaggggaggacacacgctcacagaagacaaaccccactccgctcctctcgggaaaccgcaccagacctgtgacctgggatgtttcaagacattcagatgacctaggataggagcttgcatctgcaaattctcaacatgaattcaccatccagaaaacaacggagagggcattatctttgacacagggcgaattgccccatttataaccaaaagaacccctggctgggtcgtttgagactcatcatctgtccctggagccctgatctgggaccattgaggcatgggggagaaacaacttccatcatctcctgtccc

SEQ ID NO: 34327 - DNA, 462 bp, Homo sapiens
tttgggacactcgtgaccctctttacgccaagcttggcacgaggtgcacctctgcctcccaggctcaagccatcctctcacctcagcctcctgagtagctgggacttacaggtgtgcaccaccatgcccggctaattttttaactttttgtagagatggggttttgccatgttgcctaggctggtctcgaactcatgagctcaagcaatccacctatcttggcctcccaaagtgttgggattacaggcatgagccactgcacccagccatctattttcctacatgtttaaacttttctataacaaaacataaagagtcctagatggccttgtgtatccttggctcatgctaaacctcaagaaaaggagctaaaatagctgggttatgtggagctaaagtagctgggttatgtgaagccaccggtaatatggtggcagttcagtgattcccccaggctaccac

SEQ ID NO: 34328 - DNA, 479 bp, Homo sapiens
  misc_feature (1)...(479): n = A,T,C or G
nactggaaaaattgtatgaccatgatcacgccttttaaccaacgaaattgacctgcccgtgaagaggcgggcatgacacagcaagacgagaagaccctatggagctttaatttattaatgcaaacagtacctaacaaacccacaggtcctaaactaccaaacctgcattaaaaatttcggttgggaaaaaaaaaaaaaaaaaattcctggggccgggaatttttccaaaggggaattttttggccggtgttttacaacgtggggattggaaaaaaatntnngtggcctttttgtccttctagaactctctctgcagtagggtggacaaaactactcttgggaagatctccagttgcttttgaagtgcaggatttcatttaatcgatcttgacacagccacccccttttccattaccttggtgataatcaaaaactttgcctccaccaacgggctattcttgtgtcctaacggatggaag

SEQ ID NO: 34329 - DNA, 475 bp, Homo sapiens
acttgaaaacctgatgaccattgacacgccaagcttggcacgaggggccttagctgtcctggctggtgcccctcccaggctccttttcaccctgccccctgggcctgaggccccctgtgtccaagcctccccctggctcttcagttctctagcccttggctttgctgggtttcctgactgtagccacatctctcccgctccctaagggtaacctaaccaatggaagctgccctttgggtaggtgctgggctcctgggagggcccagatgatggggtgaggcatgtctttccagaactttccctggcagggaggggatggcagaaactcagggaggggcttggggcccattgtatctggagagcctggattcctcttggcagtcttaggcccagccacttctgctacctttgcgctgctgtgagcctcaccctgggcccctgggccctgcttctctgctcccctgggtgatgggtg

SEQ ID NO: 34330 - DNA, 424 bp, Homo sapiens
  misc_feature (1)...(424): n = A,T,C or G
ggggcttttatcgttatgtcagaacttttccccagtggttttcctcttttgagtggaatgaaattgatgggggtggccaaaatgaaaaggaacacttgtacctctacctcacactctttaggtcttagaatgtgctttatgttttcattttaggactcttgagaatttctatataccagtgtgtgacaattttgactgtttgtaaatattgttacatcctatcttgatggattgtttctggaaatgggctcccaccggaaacaaaaataatcttttattttgcttttgcagagtgatggtgatgattttaattacatcattgcatttttccttggaacagcagcctgcctttaccagngttatttacttgtctactacaccggctggcggaatgtcaaatcttttttgacttttggcttaatct

SEQ ID NO: 34331 - DNA, 394 bp, Homo sapiens
gggtagaatgtagatttttacttttttctggataattttctataggatgttatttttttttaccatgacagcccgttattttaattaccaggaaaagagttattcccattttgaaaataagtttgacataaaaattaaactgtaagaaactagggaaaatttttttggcaataaaatagaactcttacaaattcataagaaaaacattaaaaccccaatatatagtagacaatttataaaattggatattcaaataattaataaatagggtttcgaaagtcagacttaccagacaaaaagaaaggttcattaaatcaatgaaataccatttctgttttcattttcatcaaatcaacaaattattttttaaattatggtacttaataaaaccata

SEQ ID NO: 34332 - DNA, 480 bp, Homo sapiens
agaaaactgatactgatgacatctacacgccaagcttgggacgaggatcatcatttacttctcatttaatggactaagtttactgaatgctgaactgggacactggatataaaactgtaaaagaatcaagtttaggtgtggagtgcttctgggacttaatgtctgatttgtaccaggttttaagtgaaagcagtttctcaagccatgttcagctgctcttccctcctcccgctatgtctgttatttcttctcaaagtgatatagtagctcaaaggtacacactttgatgtgagacacatcttacctcaaatattgttagtgcaagaggatgagctaggaactccagagactttagtactatcctacgatcttggccattcaagtccacgctggataacatgtgcaacttagaatcaagccaatagaggcgactttttataaggtctaggtaggaaaagaattgtcattacatgacaagcc

SEQ ID NO: 34333 - DNA, 406 bp, Homo sapiens
ggggtttgctttggctgaaggagttgtctttatccaggacatgctccccttgtagtaaaaggaaaggagtgccagtggcccaattatgtgttggttcaacgcttttgcccagaaattatatatgtcacttccactcacgttttgtcagaaaaaataagacaaaaatggccaagcctgatggtagtgggatggggaagtataattatgcgtaggaagtgattgagaaccataatacaatctaccacaattctccaactagtaggtagtttgacttatatgaatagatagtggcttttatttgctctctatatgtagagaaataagtaaaacgtttttggtgtcaagttgaatggcggcatgtctattattacagtagtcttctctgtagttggtgataagggaaagg

SEQ ID NO: 34334 - DNA, 468 bp, Homo sapiens
  misc_feature (1)...(468): n = A,T,C or G
aggggcgggncccgctatgataatcatgaacactgattacgccagcttggcacgagggttgtgtcattataagaggtgagctcagcttaagagcatgataacatccacattacagggaggaacagtggacatgtcaaattctcattgctgtgatttggggcaagaaaaaataacaggcaccacctagcaaccctaccccaagcatctcaagatgtggtaatttcttttatacaaaacaagtttgttttgttcaaccacgtttaagcctataggtgtgatccttgtttttataggcagctaatttcaaagtgacattttgggatggggtaatttcacttggatttttcttgctttttgaatgccttacagttgaggctgtcagcactcggcctccaccacagccaagagtcagacagaatgtggaaccacccaccaagtgggccaatgacaatgggctctacgtttctg

SEQ ID NO: 34335 - DNA, 423 bp, Homo sapiens
  misc_feature (1)...(423): n = A,T,C or G
ggaaaagcttgaggaagggaacctgcctgggtgggtgctacttctgattcattggccttgtccctgtcataagtacctccctattgtagatagaagggaaggaaactgttgacttgagcttggctaaatttcctgaaggtggaggaccttaaagttgctccaagtaaactttccaaggacttcttcctgttggtgttgtaagaaaaggcccatgcttgtccgggcacagtggcttgcgcctgttaatgccagtactttgggaggccgaggcaggtggatcacctgaggtcgggagttcgggaccagcctgaccaacgtggcgaaaccccgtctctactgaaaatgcaaaaattagcctggcatggtggtgggaggctgaagcaagagaatcacttgaacccangagggggaggttgcgtgagc

SEQ ID NO: 34336 - DNA, 387 bp, Homo sapiens
  misc_feature (1)...(387): n = A,T,C or G
ggagtccgagcgtctgagaagcagaagccacacgtcccggcgacctaagttctggatcagccggccggaggacccgtgttagcatttacaatccgaggtgagctgaagcctccggttgtcccggttcgacgctctagccctgcgagcagccgacgccggaagtctctactgctccccgctggcgcgcaggaccgcgggcatttacccgtgctttcccaagcctggaagaactcgtcatgctctttgtagcgtggtgcttctgttgctcacagaggtgcctgcttccccttctgccatgattggaagtttcctgaggcctccccagccatgtggaactgacaacttgcctttgatgattttcaagagagttgtgctatgatgtggcan

SEQ ID NO: 34337 - DNA, 411 bp, Homo sapiens
gggcttgtcggggacggtaaccgggacccggtgtgtgctcctgtcgccttcgcctcctaatccctagccactatgcgtgagtgcatctccatccacgttggccaagctggtgtccaaattggcaatgcctgctgggagctctactgcctggaacacggcatccatcccgatggccagatgccaagtgacaagaccattgggggaggagatgactccttcaacaccttcttcagtgagacggacgctggcaagcacgtgccccgggctgggtttgtatacttggaacccacagtcattgatgaagttcgcactggcacctaccgccagctcttccaccctgagcagctcatcacaggcgaggaagatgctgccaataactatgcccgagggcactacaccattggcaaggag

SEQ ID NO: 34338 - DNA, 408 bp, Homo sapiens
gggggctctacaccattggccaggagatcattagacctcgtgttggaccgaattcgcaagctggccgaccagtgcacgggtctccagggcttcttggttttccacagctttggtgggggaactggttctgggttcacctccctgctcatggaacgtctctcagactgattatggcaagaagtccaagctggagttctctatttacccggcgccccaagtttccacagctgtagttgatccctacaacttcattcttaccacccacaccaccctggagcactctgattgtgccttcatggtaaacaatgaggccatctatgacatctgtcgtagaaacctcgatattgagcgtcccacctatactaacctgaataggttaatagggcaaattgtgttctccatcactgc

SEQ ID NO: 34339 - DNA, 468 bp, Homo sapiens
  misc_feature (1)...(468): n = A,T,C or G
tggggtcnttttggtacattacactctgcnnacgccaagcttggcacgagggaagaacttggcaaggatctctttgattgtactttgtatgttctattgaaatatgatgattttaatgctgacaagcacctggctcttgaagaattttatagagcattccaagtgatccagttgagtctgccagaagatcagaaactaagcatcactgcagcaactgtgggacaaagtgctgttctgagctgtgccattcaaggaaccctgagacctcccattatctggaaaaggaacaatattattctaaataatttagatttggaagacatcaatgactttggagatgatgggtccttgtatattactaaggttaccacaactcacgttggcaattacacctgctatgcagatggctatgaacaagtctatcagactcacatcttccaagtgaatgttcctccagtcatccgggtg

SEQ ID NO: 34340 - DNA, 495 bp, Homo sapiens
  misc_feature (1)...(495): n = A,T,C or G
gtgagacagannaaaattgatanccctatgaccttgattaccctcagcttggcacgaggctggatagggaagaaacaccaaaccacaagttactggttttggcaagtgatggtggattgatgccagcaagagcaatggtgctggtaaatgttacagatgtcaatgataatgtcccatccattgacataagatacatcgtcaatcctgtcaatgacacagttgttctttcagaaaatattccactcaacaccaaaattgctctcataactgtgacggataaggatgcggaccataatggcagggtgacatgcttcacagatcatgaaatccctttcagattaaggccagtattcagtaatcagttcctcctggagactgcagcatatcttgactatgagtccacaaaagaatatgccattaaattactggctgcagatgctggcaaacctcctttgaatcagtcagcaatgctcttcatcaaagtgaaagatgaan

SEQ ID NO: 34341 - DNA, 418 bp, Homo sapiens
ggccggcacggcgagagcgcatggaacctggagaaccgtttcagcggttggtacgacgccgacctgagcccggcgggccacgaggaggcgaagcgcggcgggctacgagtttgacatctgcttcacctcagtgcagaagagagcgatccggaccctctggacagtgctagatgccattgatcagatgtggctgccagtggtgaggacttggcgcctcaatgagcggcactatgggggtctaaccggtctcaataaagcagaaactgctgcaaagcatggtgaggcccaggtgaagatctggaggcgctcctatgatgtcccaccacctccgatggagcccgaccatcctttctacagcaacatcagtaaggatcgcaggtatgcagacctcacagaagatcagctaccctcctgtgag

SEQ ID NO: 34342 - DNA, 469 bp, Homo sapiens
cttagaaaacgctatgattagattacgctcagcttggcacgagggactttttgtattccaaatgtttgtgatgctgagaagagaagttcattttatgtgatcttcatgcgtcgcaatctactttggggggataattaagattattaaaccctcatttaaatgtgacataaaatacagctttaagcacataaatataaagcagcttccatcaggaacatggagcaggcagggactccattttacagaattactgagatttctcagttgtaaaacatgatgtcatcctgcatgcctcctggaattctccaatggggtcgccaaacaacaaatggagaaaaaaaggtttacttccttgcattcttctacctttaaatagcaaagtaccactaccaccaccacctcttgcccccttccctcttttcttaaacttctggcatttcagagctcagcaggctacccctggtttctg

SEQ ID NO: 34343 - DNA, 420 bp, Homo sapiens
ggaggggccggcacagcccccatcccactgagggtggggcagctgtggggagctggggccacaggggctcctggctcctgccccttgcacaccacccggaacactccccagccccacgggcaatcctatctgctcgccctcctgcaggtgggggcctcacatatctgtgacttcgggtccctgtccccacccttgtgcactcacatgaaagccttgcacactcacctccaccttcacaggccatttgcacacgctcctgcaccctctccccgtccataccgctccgctcagctgactctcatgttctctcgtctcacatttgcactctctccttcccacattctgtgctcagctcactcagtggtcagcgtttcctgcacactttacctctcatgtgcgtttcccggcctgatgttgtgg

SEQ ID NO: 34344 - DNA, 419 bp, Homo sapiens
ggccttgatccccaaagaagctgcgccccacctttccagatacccacaaagcccccagacagaatctagcatcgggactattagcaatggcttccagaatgtgcttgggtcccacgtgactgatctgacaaaaaaaaaagagggatattaccatggcaacccttgctttccaccctgagtttgccaaggcacacaaaaatagggaacatttttttaaaaaacactccaattcagcctgagggcaacctgactctttgcatctgtatcctgctgggagaggcaattacccttaaagaatctgggggggatctctgcctttttgtctggcatttgaacttgtccttctatttactcaggaaagcaggagctacctgtaagccctggtatttccccatccctactcccagccccttctcccc

SEQ ID NO: 34345 - DNA, 419 bp, Homo sapiens
gacgagggccagtcatatggtaccctttgaatgccaccgcccctccagcctttgagaagggttttttccagggtaaagctcatgggaaccactgaagagatatttcagttgaaggaagaaaacataagcagtagccatcttcgccaccaggagcaaacacactgggcactttcattcacggcaagggcgaggggtcaacgtggaacttttcaagcatgggttggggcaagcttatctatccaagtttccctaaaagtgcaagctgtttcatttttgattccatctctccttctaccctgatatcgtgtgggctgccaattacaaaataccatggcggcgggatggcgggagcacctttacagcaaagcacctttgcatgcactttctgtctttgaggcctcctgatgacctttatcctt

SEQ ID NO: 34346 - DNA, 440 bp, Homo sapiens
  misc_feature (1)...(440): n = A,T,C or G
gagtnannagggggggatcgaaaacatcgntntgatgacatcgaagacccgantacgccaagcttggcacgagggtctggtccgaagcacattantattttagagataagttttgcatacaagtttgcccgattctctggcttggggtggtgggaggcggggagctgccactcccaaagcctccaccccttcctgaagacccagctatgaaaccgcagttcctgtgggttgggctgcccaagctggtcagagctcaccaccccaggtctggtgagcagacagagccggcgttaaaccccgatcaggtcattgtcaccacacccttgcttggatgaggaaggaaggaggcaaaggcacccactccatccaagatccgttccaattgatgagcctcagtactggcctcacactgaccaacggtggtatgctgcagtttgttg

SEQ ID NO: 34347 - DNA, 474 bp, Homo sapiens
  misc_feature (1)...(474): n = A,T,C or G
aggaggaaggggccgaccctaaaaggccctttgggaccagcaccngcanancgccagnttggcacgagggaggaggcgatacagcgggacagttaggaatgcattctgggccttctgcaaatctcggaaattggcaagggacgggattccttcctgaaagatgaactggggcttaaggctctccagcctatgcatactgtatcctgcttcaaacttaggtacaattgctcccctttttatatatagacacacacaggacacatatattaaacagattgtttcatcattgcatctattttccatatagtcatcaagagaccattttataaaacatggtaagaccctttttaaaacaaactccaagcccttggttgcgggtcgctgggttattggggcagcgccgaggtcgtcactcagtcgctctgcatgctctctgtcatacacacaggtaacctagttctgtgctcacgtggc

SEQ ID NO: 34348 - DNA, 489 bp, Homo sapiens
  misc_feature (1)...(489): n = A,T,C or G
tggaagtcccaggngannnnncattgataacgtttgacctgcctacgccaagcttggcacgagggaagctgagatggacctgggaactccaacatatgatgaaaaccccatgaaggcctcgaaaaagcccaagacagcagaagcagacacctccagtgaactagcaaagaaaagcaaagaagtattcagaaaagagatgtcccagttcatcgtccagtgcctgaacccttaccggaaacctgactgcaaagtgggaagaattaccacaactgaagactttaaacatctggctcgcaagggactccccttgcttttggtagcccaccaggcaatgttctgggcaaactgtgtaccttctaagaagcccttttcatcatagaaagtattttttttttttttgtcaaatgtcaaagctggggacccaggaacggggagggaaggtttggggagggatgcctaccttacatgacagcagtagttctctaaaaa

SEQ ID NO: 34349 - DNA, 454 bp, Homo sapiens
  misc_feature (1)...(454): n = A,T,C or G
tggactgggccgggggggttccaattgagnacgtcatggaatgcttacgccaagcttggcacgagggaaactcttgccatatatccatattcataatcattattcttcctgtgctaaaaagtacttctgaggatgaccttcattctcctatctaaattttagagtacttatgttgcaaccttctaagcccagtgatagtctgtggatgaaaggattaatattgcttagctttatgttggatttaagtgtaaatgtccatgattgtctctaacagagaagcaaatggaacccattttctcacatagaggtgcagggactgattgggtggctgcccttcagattataattgggctgaaagatgcagtatgttcagctaagaatacatcctggtgccagggagttttgtcccttaataatgttgctttgccatataagctttgcctcccagggagac

SEQ ID NO: 34350 - DNA, 418 bp, Homo sapiens
  misc_feature (1)...(418): n = A,T,C or G
ggaaagaaagaggaatctcttaaatctcccttgaagccagagtcacagctagatcttcgggtacaggagttaataaagttgatctgtaatgttcaggccatggaagaaatgatgatggaaatgaagtataataccaagaaagccccacttgggaagctgacagtggcacaaatcaaggcaggttaccagtctcttaagaagattgaggattgtattcgggctggccagcatggacgagctctcatggaagcatgcaatgaattctacaccaggattccgcatgactttggactccgtactcctccactaatccggacacagaaggaactgtcagaaaaaatacaattactagaggctttgggagacattgaaattgctattaagctggtgaaaacagagctacaaagcccagaacacn

SEQ ID NO: 34351 - DNA, 472 bp, Homo sapiens
  misc_feature (1)...(472): n = A,T,C or G
ggaggacgnccncccctgaaanncccagtttggcgagcacctgcttaccgccggnnnggcacgaggctgggccacagcagccagggctccagggcgaggacagcggacacctgcaaacaccccgttgttcatggacttgtgcccattcattcggagactcctgaaaaactgggctgtttgcaaagcaaatccagctccttgtcctatcaggttctcagaacggggagtcccctgggatggagctgctcccctcacggtagcaccacgtttccagtccctcgatgccactaatcagcatggactgtgttcaggacacagggtgaacttttctctgacccccggtgctggtcctgtgccagcacgtagtagttactcagtagaggtttgctgagtaaaccagaaatcagattatgagtgttcaggggtttgataaaacagcaccacataacgcacacaaagatactccagaaan

SEQ ID NO: 34352 - DNA, 473 bp, Homo sapiens
  misc_feature (1)...(473): n = A,T,C or G
aggagcgagggccnncccctggganncccagttgggacngnaccngcntgnnnngagggagaattgagttttggagcaagtcctgtgagcaatacaagaatctttagaacctttatgctcattttcagaagaaatatgttcaacctgggatcagacttccatgctctggggaatccaagtggtagcacctgtaaccctgtgtactaagtgctttgaagagaaaagcaggcctcagacaccttttaattgcttaggagaaaccattgtctctgactgcaggtttgaataagttgaagaccagagaaaagtacacactgggctacaaaggaatttggagatagccaaggaacaggatttcccctatcaagctaccttctgttcaaatcatgaaaaaagactatttccccttacaatagggaagcttgctattttaaagctcttgtagtgcttttcttttaaaggagatgtagtaa

SEQ ID NO: 34353 - DNA, 479 bp, Homo sapiens
  misc_feature (1)...(479): n = A,T,C or G
agagcgtgcgtatgatacttggatnactcttcggaccngcccacgccaagcttggcacgaggcgccaagctaatgcctgttttagaaacattctatgcttctaggctattttctattttattggtcagattttggcacattgctaatcaggctggcaaataaatttttagaaaagaaagttataagcccagaaaaaaaaattatatatttttctagaactctgtacaataatccctaaagaaatcttttatgtgcataaaaaaaatctcaaaacaaattctactgaaattacgttgagactatcaataaccattggcaataattatcaatggacattttaagggatagaatagagaaatacaataccttccatggcgtttcaattaattagaacatgacaactgaagcacgcttaattccatccttttaagatgcatgtgggagaaagatttccatcatcaagggaagcctacttttat

SEQ ID NO: 34354 - DNA, 395 bp, Homo sapiens
ggcacattccacctcctcttgagacatggctgtattttgttaaacaaattggtttccacagcttttgagatggattgggcagggaggagacaagtgttgcctttggctctttgatagaggatgtgctgcattcagtccagactgcagcttgccctgcgctctcacgcacacagtcctttatgaatctgactttggcagtcccccgactcttgaattttcgaaaagcggatgttttactaggctggaagaagatgaaaagctagcagggcccatatgttccttgtttttataagtaaggtcagcgagggttagagactctttaaatatttcagtttataagattagactagatcatctggaatggaagtgtggtgcccctggtcccaaacttggct

SEQ ID NO: 34355 - DNA, 430 bp, Homo sapiens
accaggcggagggtgtggacggagaggacacaggcctggagagcgtgtcattctcaggaacaccccacaagcgggactccttcatctatagcacgtggctggaggacagtgtcagcaccactagtgggggcagctccccaggcccctcttgatcaccccacccagacgccggcaagttgggggaccctgcgtgtcccgagatcaagatccagctggaagcatctgagcagcacatgccccagctgggctgttagccgggccaccccctctgaaggtgaaactgagcagatgaggccacagaagcacaaggggaaggtgccgtgtcaagcccaggcagacgagacctctgccctgaagaccaacaccagcccgtgggctgtcccctgcctccccacccttcccatggaccacccatctgggctgtctctgg

SEQ ID NO: 34356 - DNA, 378 bp, Homo sapiens
ggagttctgccacagttggctggttggctgtttatgattggtacaagcttaatttgaagttagttacaaagaatgcctctaggttaagttccagtttgtgtatggatgggttctgggtacagaaaaagccctaagctgatggctcctgcctagtctgtttttttttttttgaaaccggattttgtttttttgccacaattgttggagggcaggggcgcaatttgggttaattgaaccctttgcttttggggttgaggcctttttcctgccttgcccttttagttagatggctttacagaaccccccctttgggcggggttaattttggtatttttacaagagacggggttttgcctatttggccactctggtggcgat

SEQ ID NO: 34357 - DNA, 386 bp, Homo sapiens
ggagcactactgtggagaccacggaccctgaaaaggaggtggagccggctctggagctgttggagcccattgaccagaagtttgtggctatcagtgacttgtatgagcccattgatgatggttgtgagagccaggtgttctgttcctgctcctacgatgccaccacacactttgagacaacctgcaacgacatcaaagacatctacaaacgcatggctggcacggcctttgactttgagaacatgaagcgcaaacagaacgacgtctttggagaagctgagcagtgattgtggccgcccccagcccctgctgccccagcctgtgtctgttctcctcgagggctccagcatcctctgcttcccccaccacgttcccatcacccacct

SEQ ID NO: 34358 - DNA, 483 bp, Homo sapiens
  misc_feature (1)...(483): n = A,T,C or G
aggagctaggttgaatccttttgataacatttgacctcatacgccagcttggacgaggttgggcgtcatttttgtatggatcctttcacttgatcatatgacgaaatgcttatagagagtagctccgacctagatgatgattcttcctgtagcatctggcccctcacaatgtcagaggatttaattgtgtctaattgcgaagggttgattgaaccccacagtttaaatatctctggctcaagtgttcacccagtaaaagaaagatccagaaagcactgtttttagcattacgtatctgtgtgttactgctgtgttatttacactgttttgtattgtacaatatatatgctcagcactgcccccttctctgattgcttatgaaaaacaaaatgatgtacattactgtgaatttttataccactcatttttaaaagggctgtcttttcattntagctttccatactgtggnggtgtacacaggat

SEQ ID NO: 34359 - DNA, 386 bp, Homo sapiens
  misc_feature (1)...(386): n = A,T,C or G
ggcctcgtgccaagcttggcacgaggctatttaacacagtttgcagctcgtgccatcatttcagagctggtgagcatttcagaactagctcaaccactagaaaggggcacccattttcctctcttcctactttggcttcagcagttagctaaattacaagatcgagaatgggtaacagaactttttcaacaaagcaagggcaatatgcagaaaatgctcccagaaattgatcagaataaggaccgcatgttggagattttggaaggaaagggactgagtttcttattcccactcctcaaattggagaaggaactgttgaagcaaataaagttggatccatcccctcaaaccatatataaatggattaaagataacatctctcccan

SEQ ID NO: 34360 - DNA, 381 bp, Homo sapiens
aagaagtgtgaacaaacaagcaacagtttatgaccagcgtatatatagcaatggaaagttgcatctttgctgtgaaaacactttaaagaaaatactttttaaaaaatcccacagctttttggttgccactagacgcttcttattttaatcattttagtaatgctcagctggaccagtgttagttatatttgagtcagaaaaatggtggttttcaacttgctttataatctcctgcatctatctcctgctgtagcatcacgaaggtgtcaggcaacagtgaaaagtgcacatttttgttgttgcagaaactgtgtcagaggaataagtaaatcagcctgcagcagaagactttgttcagctccagaggcatctgtgaccgtc

SEQ ID NO: 34361 - DNA, 439 bp, Homo sapiens
  misc_feature (1)...(439): n = A,T,C or G
agagctccnnncatgatnacattgatnacatgattacgcccagcttggcacgaggggtgaacaaaaaaatatgtttctaaggaagaatcaataggacttaatgacatgaggaaaaaagtagagagtggagtggaaatgcatccagcatttgaataccagattaactggacaatgattgttttactcactaaggacaggcttgggggagaggttaggaagagaagatggtttaggagagtactaaataatttatcttggtcatattgcttcatatctactaggattgcagcctactgttgtcacattccaggactaattaaaggaagaggctgggaacagatataaggaaggaaacttaagaaaaaaagaaagaataaaaacaagttttttccaaactctgtctaccagtggtcaaagatatcgtgagttgatatgtgtn

SEQ ID NO: 34362 - DNA, 436 bp, Homo sapiens
  misc_feature (1)...(436): n = A,T,C or G
gaggccngccctgaaacctgatgacatcgtgacccgattacgccaagcttggcacgaggtgcttggcaagacacaacacttacctccaggaatgtacaggccagcgggagcccacgtatcagctcaacatccacgacatcaaactgctcttcctgcgcttcgccatggagcagtcgttcagcgcaaacactggcgggggcggccgggagagcaacatccacctgatcccgtacatcattcacactgtgctttacgtcctgaacacaacccgagcaacttcccgagaagagaagaacctccaaggctttctggaacagcccaaggagaagtgggtggagagtgcctttgaagtggacgggccctactatttcacagtcttggcccttcacatcctgccccctgagcagtggagagccacacgtgtggaaatcttgcg

SEQ ID NO: 34363 - DNA, 432 bp, Homo sapiens
  misc_feature (1)...(432): n = A,T,C or G
nttgannacagctatgatcgtgattctctccagcttggcacgaggacaagcgtgagccattgcgcctggctccaaatctgatttgagtgtaaaaagttagacacaccataagctgtaggtttattactgggtggtgaaaaacaattcaggttttctttataatagtgattatgaagtgttcttcccagactagctttatcgtcatctgggaaattgttaaaaatgcaaattcgcaagtttgagagccatggttccaagaaactgcataagcatacgaaataagttgcagcctcccgacttataccctggtacttctagtctaaaacaggatttgactctactaatccaggttagtcttgcctttcccattactcatgtgctttcgttgaaaccaaagactttttcttttgtgcccatttctactcactgcct

SEQ ID NO: 34364 - DNA, 478 bp, Homo sapiens
  misc_feature (1)...(478): n = A,T,C or G
cgaggtgccggngggnttttnactgaaaccgttgctgatccccactccagcttggcacgagggtcgcgctgtaagaaacaacaacctctcctcttagtctccgccatcagctcggcagtcgcgaagcagcaaccatgcgtgagtgcatctccatccacgttggacaggctggtgtccagattggcaatgcctgctgggagctctactggctggaacacggcatccagcccgatggccagatgccaagtgacaagaccattgggggaggagatgattccttcaacaccttctttaatgagacaggggctggcaaacatgtgccccgggcagtggttgtagacttggaacccacagtcattgatgaagttcgcactggcacctaccgacagctcttccaccctgagcaacttatcacaggcaaagaagatgctgccaataactatgcccgagggcactacaccattgtgcaggagatcat

SEQ ID NO: 34365 - DNA, 402 bp, Homo sapiens
ggctggaagtcagaggggcatggcgaggagtccagctctgaggactctgacattgatggcgaggcggaggacggggagcagggccccatctggacgttcccccctaccatccggccgagtccacacagcaagcttcacaaggggacggccctgcacagttcacagaagcctgcggagcccgtcaagaggcagccgaggtcccagtgcctgtccacgctggtccggcccgtcttcggagagctcaaagagaagcacaagcagagcggcgggagcgtgggtgcgctggaggagctggagaacgccttcagcctggccgaggagtcctgccccggcatctcaaacaagctgatggtgcacctggtggagcgagtgcagaggttttcacacaacagaaaccacctg

SEQ ID NO: 34366 - DNA, 438 bp, Homo sapiens
  misc_feature (1)...(438): n = A,T,C or G
agatggtctnnccctgagnactcgatgacatcattacgccaagcttggcacgaggtgcttggcaagacacaacacttacctccaggaatgtacaggccagcgggagcccacgtatcagctcaacatccacgacatcaaactgctcttcctgcgcttcgccatggagcagtcgttcagcgcagacactggcgggggcggccgggagagcaacatccacctgatcccgtacatcattcacactgtgctttacgtcctgaacacaacccgagcaacttcccgagaagagaagaacctccaaggctttctggaacagcccaaggagaagtgggtggagagtgcctttgaagtggacgggccctactatttcacagtcttggcccttcacatcctgccccctgagcagtggagagccacacgtgtggaaatcttgcggaggct

SEQ ID NO: 34367 - DNA, 428 bp, Homo sapiens
  misc_feature (1)...(428): n = A,T,C or G
ctgctctgggtacaggggacatagccatggacagaacagacttctccaaaggcccttaaggccagggcactggggctgcttactccatctgcagagtttgtggttagactgaccaggcgctcaggtctggacgggaagccccgcactgcaataaggaactgtggctgctctttcttctcacatccaggtctgggactagcttctcagccccagagacaaaagggtacttcccaaacccaccccactcagtgacactgggccatctctgagaacacagcaagtccctgtggccccagcccactgccatagcgctgtctgccagaatccacacctgcctcctcttcacccacctactgactcctggagagagaaagacaagtccttggcctttatgacactaactgcaataagtcagacacagctgcagn

SEQ ID NO: 34368 - DNA, 425 bp, Homo sapiens
  misc_feature (1)...(425): n = A,T,C or G
gggggcagaaactgggcagccctgacttgatagcagcagggggagctcccaagctgccaagcccctgcctccagccttcctgagtttctctctcctgaaccctactctctcctttttgcttcctcagtttttatcaggctttctctgggggacagcagtctctgagcaccagggagcagttgccctcaagcctgtgcccagcatgccctcccctttttatacgaatgctttctaccactgcgcttgggtttgccatgatgcgaggctgagttgctgtagcgccttgattctctccctgggtctgcgatccctcccctgggcctgactgagcctgcgcattgcttttccctttattacacaggacagccaggggaggaggggggcccagccctgggaggctggtgggaggcagggggcacgcctgn

SEQ ID NO: 34369 - DNA, 399 bp, Homo sapiens
ggaaattgtctgcctgcacatgtatgcatatacatatattcataatcataaaacttaatctaaacgggattttttttggggggggtgatatggtttggctgggtccccacccaaatctaatcttgaattcccatgtgttgtggggggacccggtgggagagaattgaattatgggggcaggtctttcctgtgctggtctcgggatagtgaaaaagtctcacaaaatctgatgggtttaaaaagacgagctcccctgcataaactctattgtcctgtctgggtccatgctaaatgtgccttttgccttccgccattattgcgaggcctccccagccatgtggaaccccccataaggggaagggacttgccttgtcttggatgagactttggactttggac

SEQ ID NO: 34370 - DNA, 433 bp, Homo sapiens
  misc_feature (1)...(433): n = A,T,C or G
gaggtcnncatgaaacctgagncatcttgacccgattacgccaagcttggcacgaggtgcttggcaagacacaacacttacctccaggaatgtacaggccagcgggagcccacgtatcagctcaacatccacgacatcaaactgctcttcctgcgcttcgccatggagcagtcgttcagcgcaaacactggcgggggcggccgggagagcaacatccacctgatcccgtacatcattcacactgtgctttacgtcctgaacacaacccgagcaacttcccgagaagagaagaacctccaaggctttctggaacagcccaaggagaaatgggtggagagtgcctttgaagtggacgggccctactatttcacagtcttggcccttcacatcctgccccctgagcagtggagagccacacgtgtggaaatcttgc

SEQ ID NO: 34371 - DNA, 420 bp, Homo sapiens
ggcccttttgaatattcctttcaatatttagaggaaggttgaaaagaaacttaaatcgctgaagcacattgagtgcatttctagtggaatctgccttgtctttccgacctaatacttcttgaaacaatgtgtctgcagtattacttgctctgttcagaacattctccagtttctgcgtcatggatccttctactttttccgttccatctgcttctagtttttgatggatggctgagagggcatcctgtgcttctaagaatgtactgagaccgcctttcacataggccaggctgccctcactcttcttgttagcctgtctctttaggttggtgactgccattttgagctgctcaaaactggtgtttgagtgattctctataagataccaggctgctgagaaattctcacttgtaaaatcag

SEQ ID NO: 34372 - DNA, 435 bp, Homo sapiens
  misc_feature (1)...(435): n = A,T,C or G
gtggtctnccctgagacatgatgacatgattacgcccagcttggcacgaggaacaaaatggattccactgagccaccctactgccttaaaagatatgaggaaattgctaaggaagtcagcacttacattaagaaaattggctacaaccccgacacagtagcatttgtgccaatttctggttggaatggtgacaacatgctggagccaagtgctaacatgccttggttcaagggatggaaagtcacccgttaggatggcaatgccaatgtaaccaccctgcttgaggatctggactgcatcctaccaccaactcgtacaactgacaaaacccttgcgcctgcctctccaggatgtctacaaaattggtggtattggtactgttcctgttggccgagtggagactgttgttctcaaacccggtatggtggtcacctt

SEQ ID NO: 34373 - DNA, 433 bp, Homo sapiens
  misc_feature (1)...(433): n = A,T,C or G
gaggcccccctganacatgagacatcgtaacccgattacgccaagcttggcacgaggggcttggcaagacacaacacttacctccaggaatgtacaggccagcgggagcccacgtatcagctcaacatgcacgacatctaactgctcttcctgcgctttgccatggagcaggcgttcaccgcacacactggcgggggcggccgggagagcaacatccacctgatcccggacatcattcacactgggctttacgtcctgaacacaacccgagcaacttcccgagaagagaagaacctccaaggctttctggaacagcccaaggagaagtgggtggagagcgcctttgaagaggacgggccctactatttcacaggcttggcccttcacatcctgccccctgagcagtggagagccacacgtgtggaaatcttgc

SEQ ID NO: 34374 - DNA, 450 bp, Homo sapiens
ggtaacgtgacattattaaattttttattttattaacactaatattttaactacaattacagcatatgggcaatacagaatttacctaaaaggatactaatttggaacaaaaaaaatcacctttcgcacatgtatcatgtcacaaccagtttgccattgaaacaaatagaggttgcaaatattgtcagattgtcaggctgtaagaaaggatgaaattcatttcccattgcatcatcttgtggcccatggatttcaagtgccttagccaaaatcatatagctagttagcagtagagccgagactcagaaaaaaacaaagtaaaacaggcagactgaaacaaaaagtcttctaattcccagtccacatgtaaaatttgcttcatataaacaaacctaattgtaaatggcactgtagcaacaggcttctttttaacactcggattgggtaagg

SEQ ID NO: 34375 - DNA, 401 bp, Homo sapiens
  misc_feature (1)...(401): n = A,T,C or G
ggcctcgtgccaagcttggcacgaggtggattttcaagtactggttggggatgggaatcgtgcttttctttaaacttcagtttacgagatgctttgagagcgttaggcaaaagcagaaataaatatcaggagcaacggggaaagctttataaaagatcatgggggccactgttgcagctttgaagaatgagtgctggcttgaacagttctttgcctgcatcattggtagctgcactgaaaggaaaaaactttcaccttaagaatttgaaaaggaagaaacctgggctctggtcttcatggcatttagactgagatgcttaaacagaacagaagtaatacgcatttcctgccataggatagggaaaatgtaacaagctgggtgctcttgagggtagaaaatn

SEQ ID NO: 34376 - DNA, 495 bp, Homo sapiens
attggaaaaactgagaaacctatcaccatgaccacgccaagcttggcacgaggattttttccagatagagttttgctctcgttgcccaggctggagtgcaatggcacaaactcggcccactgcaacctccacctcctgggttcaagcgattctcctgcctcagcctcccaagtaactgggatcacaggcacatgccaccacgcagccaactgatttttaagaaaacaaaattacttacctatagggatgtcactgtcggcttgctttgcaccattctgtaatgtaatgtacacagtgtcaaataaatattacctgctgggtgactcctaactggttcaaggcaacaaagaaatgatgtaaagccacaacacaaacattgtacattagtattttcaggtcccctgcgaaatgatatcacgatgacagaaaaagcatcctcagactccagaggtaccacctcagaaacactcctctacgaaaatggatctgatgtcg

SEQ ID NO: 34377 - DNA, 405 bp, Homo sapiens
gggtagaaatgtttctcttgcctaaattcaggtgctttataaacatcaaaatggtaacctctactatgaagtgtttccaatgatgggatatctgaggccattacattcctgggaataacatggtgaggtgcagggtggtggtggtggtgaaacatacgacagaccactgtaagtgagaacaaattactggcccagcccaacccacaccaaataagaaatttaatatccctttggcctgttttagattttggcaaagccaggcccatagtgcttgctgggctctctcttccacatcatccagaagacacacatttgctatggaatgattgtggaggtgagagtatagtgcatattaattcatgcaaaaagttagatattagcccagaaatgttagtaacaagaaag

SEQ ID NO: 34378 - DNA, 386 bp, Homo sapiens
  misc_feature (1)...(386): n = A,T,C or G
ggaggaaaaataggggttattttatctttttccccttattaaaaacaagaactaccaaaccaagggctaaacttaaatagtcctacacctattctgcaaacactagtaataggaaaataatgcctgactggaattcccttgtcttttttccttagatgataaaagtagtaacatgccttgctgaggaaagcaatggatataaatgcctgtaaaatacgctgctctaacatctgaaagtgattaaaatgattctatataatgccttcgtcaagatggaaaatcaaggaggaagaaagagaaacctttggggccaggcttagggtagacggggctgaggcctggcaagacagcccgtctacagtcactggacataggggaaacccacn

SEQ ID NO: 34379 - DNA, 405 bp, Homo sapiens
  misc_feature (1)...(405): n = A,T,C or G
ggaaaccttgcaatatcagctagatttacactccgggacgttgcccaaaggtaggaagaaagcagagggaaatatttcagtcatcatttccaaagtcattatcaaaatctgtgaggaagtttaatcttccaaagagtcaatgtcagacatcaggcctctgttgcctgcttctctcgaggcactagattaggagtcttcaataagagacttaacatgaggtatatggaagatgaggcaccgagataagttcatcattaggtgtgagcactgctcacccttgctggcaagttctccttaagggcctgaagcacaggtgtccaaagaaaagcgttaagtccatcttaatagaatctatngtggatatgatngtggcagcccctggtctgtgatcaacaagaacctaca

SEQ ID NO: 34380 - DNA, 424 bp, Homo sapiens
  misc_feature (1)...(424): n = A,T,C or G
ctagatgatttgtatatagcccaatgcatctctggaactctgtctaaacaccagccatctacttggaatgggccccaggactgtggtatttgcctgggccaggaaaggataagaaatcctgtcatgtgaagacagcttgagaggcttgagaaaagtggggctggggagaagcaggcttgtcagactccacccctgttgatgatcattcctgggaaggggtttctcgttctatgcaatcctaaaggacgaaactcacccatgggaggccgaattctccttgggatgaagaaatttctctttccctgtcatgagtgnccagccagggagcagggaggcagtgtcagggagggactctcatcctggaggaaatgggattccaagtcaaggatgctgaggctgtcagggagccacagaggggggtcct

SEQ ID NO: 34381 - DNA, 435 bp, Homo sapiens
  misc_feature (1)...(435): n = A,T,C or G
natggtgactgtcgggaatgtaagnccgtccagcttggcacgaggcacagccaactcagncataccttactttatgcactgagtacgcattaaactctatttaggaaggaagagggaagcaaaggaagccagggatggttttgtcatgacctctctttgctttctgacctcccggaatccactctttggaagatgtgcagaaaacaatgtgacttccatttaccctgcctcagatctcccctccttcagactggctcccacccctggttaatggggtaacctgggtacgcctatttgttaaaggaatttgtgggaagtgaggggcaaaattgttggagcagagggaatagatttatgggagctttgttacccagtgactatcccagcattaatacttcagagtagccctgacgcttgtggaaacatttcaagggn

SEQ ID NO: 34382 - DNA, 389 bp, Homo sapiens
aacagagtctttgttggagttttttatgcaaagaggtcagcgggtggtgaagcatgcattgcttcaacaggatttgcgcgcatttcccatgatcctgcattcttgtgttcttgatagcatacagacttactcacaaacaacagtcgctgcttaatttgtctattttgtaagcttaggctactattttattaaaactggacatagatacttggctgaaaacaaataattttgcacattgcaatataattaaggaaacaggaacaactagtgggctatgcttaagtttttcttgaaacctaacattgctttatgctgggtgccacggctcgtgcctcgaatcccagcgctttggcaggctgaggcgggaggatcacttgagaccgggagtt

SEQ ID NO: 34383 - DNA, 471 bp, Homo sapiens
  misc_feature (1)...(471): n = A,T,C or G
aggtaggggnccnncnactgataccatgattaacgtttgacctgcattacgccagcttggcacgaggggagaaacaagagttgaaataaaagaatctgttcgtggccaagatattttcattatacagacaatacccagagatgtgaatacagctgtgatggagttgctcatcatggcttacgcactgaagactgcctgtgccaggaacattattggggtcatcccctacttcccctacagcaagcagagcaagatgaggaagaggggttccattgtgtgcaagctgctatcatccatgctggcgaaagcaggtttaactcacattatcactatggatcttcatcaaaaggaaatacaaggctttttcagctttcctgtggacaaccttagagcctcacctttcctgcttcagtatatccaggaagaaattccaaattacagaaatgcagtcattgtagctaagtctcctga

SEQ ID NO: 34384 - DNA, 446 bp, Homo sapiens
  misc_feature (1)...(446): n = A,T,C or G
ttaaatccgaaagatcaagtacanacanccnnnaagnnttggacgaggaaatactgttttgttgtgaattgaacaatgaggggctgggacagtgactgggggcatcaccatactcaatgcttagagcctccaaaggttgtaatctagctctggggaggagtgaggctgatctgagtctcccacggtctttataatgtgtcctggcaggaggactgataacaagctggtcaggactggtgtcagctaatggacagacagggaccacaaactgttgctgggggaaatgcggctttattctagtatcttgggctgggcaggggaatcacccagactgcttacccctcactcctcatgctcagcatgtcaagggcccaagtcttccttttctgtcactctctctggcattcctgaatagatatcaccctatagatgtctgatgtgaaaan

SEQ ID NO: 34385 - DNA, 487 bp, Homo sapiens
  misc_feature (1)...(487): n = A,T,C or G
nattgacaacccttactggataaacctcggaccangcntacgccaagcttggcacgagggcttattcaggtatgtttctgtacttctcttgtttggcttactgataacagataaagggaagtcttgactgactcgctatgatgatggattccaaaaccattcgtagtttccaccagaaagtcttatgttggccagttccttccttggatgtctgagcgaccattcttccttagcaggaccctagcactgtcacagacctggagtccattgtagtaatttgttttatttcctaccaaggtttatgaaggcgagcgtgccatgacaaaggataataacctgcttggcaagtttgaactcacaggcatacctcctgcaccccgaggtatgcctcagattgaagtcacttttgacattgatgccaatggtatcctcaatgtctctgctgtggacaagagtacgggaaaagagaacaagattactatcacta

SEQ ID NO: 34386 - DNA, 420 bp, Homo sapiens
  misc_feature (1)...(420): n = A,T,C or G
ggctcatcatcatggggaataagaaacattctgacatctatttccttttctttctttttaaatttggtagacgagggagagggtccccaacagaatgagagggggaagatatgaaccagaacataaaccctttaccccccaccccactcttttgggaacatcccaacattaaaagagtgggatatccagtcattttttccaagctggagcaagcaatgtagccaggattgaggaaggagaagccacagaaatgcagatatcctataaattttgaggctaactccagaaggttgtatactgatttaggctacctccttccagactcccaggggtacaaacacctttacagtcccctgcgggaagacatcaatggaaatatttggggaatgaggctaaanagcatgagatacatcagtttac

SEQ ID NO: 34387 - DNA, 445 bp, Homo sapiens
  misc_feature (1)...(445): n = A,T,C or G
taaatcctagttatctagtatcaacanccnnnaagnnttggacgaggcaaaggtatacaaagagggagagggcgaaggctggaaggggagttataaagaggctgaaattaagagggcgagaaagcagcacgacttgaaacttcctacatgttctctaactgtatctgggtaaaaaggtgcgcgccagctgtgggacaactttgtccatttccttattaggagaaataaatttcgcttagctctgcgcactcccatttccaaaaataaactcgcctcccccattccagttgcagtaatcaagaaagagactgccttgtcattgtttcttatcccccaacttcatgttccctgcaatttatttaaagaaactttgtatttcactacataatctgaaatctttctccctagccccctctgaatccttctgcctactgaaatctgatat

SEQ ID NO: 34388 - DNA, 476 bp, Homo sapiens
  misc_feature (1)...(476): n = A,T,C or G
ntttgacagccgttattagcatgactactccaagcttggcacgagggccaacgctgctatgctttcatctagttgggaacggttcgaggggagttttggggcccagccttccacctggtagctggaatcaaagtggacagagctgtggtgctgctcctggtgtccttgtcctgaagttggcactgcatggtttaaaatcttttctacttaactctttaagtccccatcaaacctatgaaaatcttgcatcctaattcctctcctttgatattgnggaatagggtttacatttttagaatccaagaagcatgctctccttgttgtgggtacactcagtgctatcctggatacacagcaggtatatgagacagctctccttggaggggtgtatatgttgtctgctcacagaggacatcaagttctgaaagacgcatgaaagggaactcgcagaggagaggcctctttccagggagagc

SEQ ID NO: 34389 - DNA, 444 bp, Homo sapiens
  misc_feature (1)...(444): n = A,T,C or G
ngggaacttaagacgtcgtagangcatacgccaagcttggcacgagggccccacccttagaacggagtcgcctggcgacgacagccttttgtggttcctatgctggggcggtggtcgcgatgcccctcgccggggtccttgtgcagtactcaggatggagctctgttttctacgtctacggcagcttcgggatcttctggtacctgttctggctgctcgtctcctacgagtcccccgcgctgcaccccagcatctcggaggaggagcgcaagtacatcgaggacgccatcggagagagcgcgaaactcatgaaccccctcacgaagtttagcactccctggcggcgcttcttcacgtctatgccagtctatgccatcatcgtggccaacttctgccgcagctggacgttctacctgctgctcatctcccagcccgcctacttcg

SEQ ID NO: 34390 - DNA, 468 bp, Homo sapiens
aggggcggggcctgcccctggtagcttaagtatcttcgaccagcttggccgaggaaaaaccaaaatcccagaaaacagcgcatagggtaggctgggccagccgaggattatgtgaaggttcgttgggaccctccggaggccagtggggtactgcaaagagccatgggggtgttgatgtccaagcggcagacagtggagcaggtgcagaaggtgagtctggctgtgtctgctttcaaggatgggctgcgggacaggcctttcattcgacgcacaggtgagctgccagggtcccgccgtggcactgtagagggctccgtccaggaggtacaggaggagaaggaagcagaagcaggaacctcggtggtccaggaagagagtattgccggccgcgcagcctgggagcggctccgagatgggcgcggcgtggagcctgaggagtttgacaggacaagtcgattcacaccccct

SEQ ID NO: 34391 - DNA, 402 bp, Homo sapiens
ggcgcactggcacctaccgccagctcttccaccctgagcaacttatcacaggcaaagaagatgctgccaataactatgcccgagggcactacaccattggcaaggagatcattgacctcgtgttggaccgaattcgcaagctggccgaccagtgcacgggtctccagggcttcttggttttccacagctttggtgggggaactggttctgggttcacctcgctgctcatggaacgtctctcagttgattatggcaagaagtccaagctggagttctctatttacccggcgccccaggtttccacagctgtagttgagccctacaacttcattctcaccacccacaccaccctggagcactctgattgtgccttcatggtagacaatgaggccatctatgaca

SEQ ID NO: 34392 - DNA, 407 bp, Homo sapiens
gggtggggctggcctcatctcctcctgcctttcctcccttatcagtttctctttaaaggtgtgcccctcctgctctcccaggagcagtgagttgtgagtggaaagaaggctggtgcagacccagctgccttagacagattccctgggcctgcatctcctggcgccggctgcttctgggcccaggaagaggctgtggctcccaccttccttacacctggagggagcccgcctcgcaccagctgcacctgcctagcattacaggctctcagatctgcccttgcttgcctcatacctctgtgctccacactgcggccaggccagctgagtccctccatccgtggatgctttcctgcagctatgtggtatgggggtcattcctgcctcttggcaccaggctggggggcatg

SEQ ID NO: 34393 - DNA, 399 bp, Homo sapiens
ggaaactgaatggcctctggagccgtatttctcacttagttctgcctgtgcaacctgaaaatgccctgaaaaggggcatctgcttataagaagtgagagagaagaaaaatcatgtcccaagttctgagaattgttcacactttctaaccagagacagaattcagagctctttttgaaagaactagtttctttttaaagaagttaagtgcttacataaacatggaacatataaatcattcattcaacctaattatctgtgatatgagagaatcatttcagtttccattgagagctctgttaaaggtatcttaggagtgcagattatatgcagttccttagagaatctgttttgattctgggctgagttattacagttatggtatgaccagtgagagcgat

SEQ ID NO: 34394 - DNA, 467 bp, Homo sapiens
  misc_feature (1)...(467): n = A,T,C or G
acggcccccncttgcnacatctatagatcactacgccaagcttggcacgaggaacacgctgaagaatttcttatcaaacctgaatccaaagttgctaagttggacacgtctcagtggccccttttgctaaagaattttgataagctgaatgtaaggacaacacactatacacctcttgcatgtgggtcaaatcctctgaagagagagattggggactatatcaggacaggtttcattaatcttgacaagccctctaacccctcttcccatgagggggtagcctggattcgacggatacttcgggtggagaagacagggcacagtggtactctggatcccaaggtgactggttgtttaatcgtgtgcatagaacgagccactcgcttggtgaagtcacaacagagtgcaggcaaagagtatgtggggattgtccggctgcacaatgctattgaaggggggacccagct

SEQ ID NO: 34395 - DNA, 445 bp, Homo sapiens
  misc_feature (1)...(445): n = A,T,C or G
ttaaatccgatggatctagtagcaacanacnnnaagnnttggacgaggaagaactacatagaaatgaaaccacatccgtggttttttggcaaaatccccagagccaaggcagaagaaatgcttagcaaacagcggcacgatggggcctttcttatccgagagagtgagagcgctcctggggacttctccctctctgtcaagtttggaaacgatgtgcagcacttcaaggtgctccgagatggagccgggaagtacttcctctgggtggggaagttcaattctttgaatgagctggtggattatcacagatctacatctgtctccagaaaccagcagatattcctgcgggacatagaacaggtgccacagcagccgacatacgtccaggccctctttgactttgatccccaggaggatggagagctgggcttccgccggggagatt

SEQ ID NO: 34396 - DNA, 429 bp, Homo sapiens
ggagagcgaggtcagcggggctgcgagcactatgacagaggatgtctcctaaaggcaccttgctgtgacaagctttatacttgccgcttgtgtcatgataacaatgaagatcatcaactagatcgctttaaagtgaaggaagtgcagtgcataaactgtgaaaaaattcaacatgcccaacagacttgtgaagaatgtagcacattgtttggagaatattattgcgatatatgccatttgtttgacaaagataagaagcagtatcactgtgaaaactgtggaatttgattggtccaaaggaagattttttccattgtttgaaatgtaacttatgcctagctatgaatcttcaaggaagacacaagtgtattgaaaatgtgtcccgacagaattgtccaatatgtttggaggacattcacacatcccgtg

SEQ ID NO: 34397 - DNA, 463 bp, Homo sapiens
cgcctcccatgacccttcgatgagcacttctaaaccacatacgccagcttggcacgaggaacacgctgaaaatttcttatcaaaccttaatccaaagtttttaagttggacacgtctcaggggccccttttggtaaagaattgtgataagctgaatgtaaggacaacacactatacacctcttgcatgtggttcaaatcctctgaagagagagattggggactatatcaggacaggtttcattaatcttgacaagccctctaacccctcttcccatgaggtggtagcctggattcgacggatacttcgggtggagaagacagggcacagtggtactctggatcccaaggtgactggttgtttaatcgtgtgcatagaacgagccactcgcttggtgaagtcacaacagagtgcatgcaaagagtatgtggggattgtccggctgcacaatgctattgaagggg

SEQ ID NO: 34398 - DNA, 413 bp, Homo sapiens
ggggtgatgtctcacagaaagttctccggtcccagacatggggccctcggcttcctgcctcggaagcgcagcagcaggcatcgggggaaggtgaagagcttccctaaggatgacccgtccaagccggtccacctcacagccttcctgggatacaaggctggcatgactcacatcgtgcgggaagtcgacaggccgggatccaaggtgaacaagaaggaggtggtggaggctgtgaccattgtagagacaccacccatggaggctgtgggcattgtgggctacgtggaaacccctcgaggcctccggaccttcaagactgtctttgctgagcacatcaatgatgaatgcaagaggcgtttctataagaattggcataaatctaagaagaaggcctttaccaagtactgcaagaa

SEQ ID NO: 34399 - DNA, 407 bp, Homo sapiens
ggcaatagatcctttattcactagttacgcaaattggttcctagggggatactccttaccttcctttgtgatggcccaaaatgtctctaggtatctcaagtgataagtaaatttctacaaaaaaaaatggttaatgttcattgactggctttttaagtgtatattttggaggacgggtgaagaggtaataacgaaagcaagcgagtgaattaggatttcaaagtgccctaatagtgtgagtctccagttcctaaaatatgaaaagtgctgtcgttggggtgaaaccatgagactgacagatctgcctgaaatggggggtgtgggaggtggtggcgggggttattctctttccttcaggaaatgaacccttcttacatcattcaagttctgctctgaggatcaagctt

SEQ ID NO: 34400 - DNA, 467 bp, Homo sapiens
cccccccatagataacgtctgacatgattacccccagcttggcacgagggatggcgtgatgtctcacagaaagttctccgctcccagacatgggtccctcggcttcctgcctcggaagcgcagcaacaggcatcttgggaaggggaagagcttccctaaggatgacccgtccaagccggtccacctcacagccttcctgggatacaaggctggcatgactcacatcgtgcgggaagtcgacaggccgggatccaaggtgaacaagaaggaggtggtggaggctgtgaccattgtagagacaccacccatggtggttgtgggcattgtgggctacgtggaaacccctcgaggcctccggaccttcaagactgtctttgctgagcacatcaatgatgaatgcaagaggcgtttctataagaattggcataaatctaagaagaaggcctttaccaaggactgccagaaat

SEQ ID NO: 34401 - DNA, 414 bp, Homo sapiens
ttgccggtgtcctgggattacaaggcactacaaatactgtggcagcatataatttaacttggaaatcaactaatttcaagacaattttggagtgggaacccaaacccgtcaatcaagtctacactgttcaaataagcactaagtcaggagattggaaaagcaaatgcttttacacaacagacacagagtgtgacctcaccgacgagattgtgaaggatgtgaagcagacgtacttggcacgggtcttctcctacccggcagggaatgtggagagcaccggttctgctggggagcctctgtatgagaactccccagagttcacaccttacctggagacaaacctcggacagccaacaattcagagttttgaacaggtgggaacaaaagtgaatgtgaccgtagaagatgaacggt

SEQ ID NO: 34402 - DNA, 436 bp, Homo sapiens
  misc_feature (1)...(436): n = A,T,C or G
natgaaaaccattatgttgagaatcactccagcttggcacgaggcgaccgcctaagagtcgcgctgtaagaagcaacaacctctcctcttcgtctccgccatcagctcggcagtcgcgaagcaccaaccatgcgtgagtgcatctccatccacgttggccaggctggtgtccaaattggcaatgcctgctgggagctctactgcctggaacacggcatccagcccgatggccaaatgccaagtgacaagaccattgggggaggagatgattccttcaacaccttcttcagtgagacgggggctggcaagcatgtgccccgggcagtgtttgtagacttggaacccacagtcattgatgaagttctcactggcgcctaccgccagctcttccaccctgagcaacttatcacacgcaaggaagatgctgtcaataact

SEQ ID NO: 34403 - DNA, 472 bp, Homo sapiens
  misc_feature (1)...(472): n = A,T,C or G
cgggannaattgatagcgttcgatcctgantacgccaagcttggcacgagggctgctgaagacaatgaacttacttttaaagctggagaaattattacagttcttgatgacagggatcctaactggtggaaaggggaaacccatcaaggcatagggttatttccttctaattttgtgactgcagatctcactgctgaaccagaaatgattaaaacagacaaaaaaacggtccaatctaatgatgatgttcaggtagagacaataaaaccaaagccggaaccagcctttattgattaatataaaatggaccaactgctacctatgctggctagtacagaccccaccgatgatcaaccagacctacctaagctgcttcattttgaagcaatgtgtcaccagatgggacctctcattgatgaaaagctggaagatattgatagaaaacattcataactctcagaacttaatgtgg

SEQ ID NO: 34404 - DNA, 382 bp, Homo sapiens
gggggacaggagtgaatagaaagggaggagagctctattatgttctatacacagattaggagatgaccttactgggtacacccctctaaccagtgcttacaggttaatgcatgttaatgaatatttttgcagttgtaaagcataacaattacaactacacatctatttctaaagaataaaacaggaccatatttatttacttctgtcaactatagaaagaaagaccttcagctgtatttccacagatttctcccaaggaaaaggctaatattagtcactactgttatcacatccctttgtataagttttaaaaagagatggagggagatcttcatttctttgaggagatcagtattgtaacgtatgtgaatagatgataaca

SEQ ID NO: 34405 - DNA, 381 bp, Homo sapiens
ggattactactatgacaccttcaaaggagatgactacaatgaggagaatcctactgaacccggcagcgacggcaccatgtcagacaaggaaattactcatgatgtcaaagctgtctgctcccaggaggcgatgacggggccctgccgggccgtgatgcctcgttggtacttcgacctctccaagggaaagtgcgtgcgctttatatatggtggctgcggcggcaacaggaacaattttgagtctgaggattattgtatggctgtgtgtaaagcgatgattcctccaactcctctgccaaccaatgatgttgatgtgtatttcgagacctctgcagatgataatgagcatgctcgcttccagaaggctaaggagcagctgga

SEQ ID NO: 34406 - DNA, 488 bp, Homo sapiens
  misc_feature (1)...(488): n = A,T,C or G
ctttgacnaccctttcagtagtaaacatcggaccangcntacgccaagcttggcacgaggagggagtcgatgcccagggcacgctttccaaaatttttaagctgggttgaagagatagtcggtctggatgacccatggcttgacgctgaaaacccacctggttgcggaatcctgtcctcagcttcttaatataaccgccttaaaactttaatcccacttgcccctggtacctaattagagcagatgacccctcccctaatgcctgcggagttgtgcacgtattaagggcaggccacggtggcctaccggcaatttccggccaacagttaaatgagaacatgaaaacagaaaacggttaaaactgtccctttctgtgtgaagataacgttcctttccccgcaatgtgcccccagacgcacgtgggtcttcagggggccaggtgcacagacgtccctccacgttcacccctgcacccttggactttcttt

SEQ ID NO: 34407 - DNA, 480 bp, Homo sapiens
  misc_feature (1)...(480): n = A,T,C or G
catgaaaccgtcgtagatgaccactccagcnnggcacgagggaacaatctgctgaagacactggccagtcctgagcagcttgcccagtttcaggcccagctgcagactggctccccccctggcaccacccagccacagggcaccacacagccccccgcccagccagcatcgcagggctcaggaccaaccgcatagctgcctatgcccccgcagaactggctgctgcgtgtgaactgaacagacggagaagatgtgctagggagaatctgcctccacagtcacccatttcattgctcgctgcgaaagagacgtgagactgacatatgccattatctcttttccagtattaaacactcatatgcttatggcttggagaaatttcttagttgggtgaattaaaggttaatccgagaattagcatggatataccgggacctcatgcagcttggcagatatctgagaaatgggttaattcatgct

SEQ ID NO: 34408 - DNA, 430 bp, Homo sapiens
ggaagatgctggccgcgtacctgtatgaggtctcccagctgaaggactaggccaagccctctgtgtgccatctccaatgagaaggaatcctgccctcacctcacccttttccaacttgcccagggaagtggaggttccctctttcctttccctcttgtcaggtcatccatgactttagagaacagacacaagtgtatccagctgtccacgggtggagctacccgttgggcttatgagtgacctggagtgacagctgagtcaccctgggtaagttctcaaagtggtcaggatggcttgacctgcagaagatacccaaggtccaaaagcacaaggtctgcggaaagttctggttgtcggctgggcaccacggctcacacctataatcgagcactttgggaggccaagacaggaggatcacttgaggccaggg

SEQ ID NO: 34409 - DNA, 418 bp, Homo sapiens
  misc_feature (1)...(418): n = A,T,C or G
ggagcagacagatcacacaagcttatggtttctatgatgaatgtttttgaaaatatggaaatgcaaatgtttggaaatattttacagatctttttgactatcttcctctcactgccttggtggatgggcagatcttctgtctacatggggggctctcgccatctatagatacactggatcatatcagagcacttgatcgcctacaagaagttccccatgagggtccaatgtgtgacttgctgtggtcagatccagatgaccgtggtggttggggtatatctcctcgaggagctggttacacctttgggcaagatatttctgagacatttaatcatgccaatggcctcacgttggtgtctagagctcaccagctagtgatggagggatataactggtgccatgaccggaatgtagtaan

SEQ ID NO: 34410 - DNA, 426 bp, Homo sapiens
  misc_feature (1)...(426): n = A,T,C or G
ggtagaggtaccagcaatatgtaaatagtgcagaatctcataggttgccaataatacactaattcctttctatcctacaacaagagtttatttccaaataaaatgaggacatgtttttgttttctttgaatgctttttgaatggtatttgttattttcagtattttggagaaattatttaataaaaaaacaatcatttgctttttgaatgctctctaaaagggaatgtaatattttaagatggtgtgtaacccggctggataaatttttggtgcctaagaaaactgcttgaatattcttatcaatgacagtgttaagtttcaaaaagagcttctaaaacgtagattatcattcctttatagaatggtatgtgggtaaaaccagaaagcacatctcacacattaatctgattttcatcccaacaatn

SEQ ID NO: 34411 - DNA, 420 bp, Homo sapiens
ggctggatatcacatgaactataatgtatgactacaattcagctaaacacccaattctgttaagaaacacaaaccaatgagatccacaaagcctggagatagagaaggtccacagggcctctccatcaacattgagcggataaaggaacacacatattcagaccattccatgtgtctccagtgtactcacaggaagggggccaaggtcattggggtttaaagatgtctttgaccgcatatgtactggaaatttcaaacgtggatcttcctgcaagaaaaatgtaaaagacagtagatgctaagtggaagtatctgtgtgcagttactgggtgcttttcttcttgagctgtttgtttcaaggcaaccaagctgtccatgcctggagcgtgagatgggtcccatctctgttttgtacaggaa

SEQ ID NO: 34412 - DNA, 426 bp, Homo sapiens
ggtggcacagctcagccagttgatgaagaactttataaggtgattggcaaaggcagtgaaaagtctgatgacaactcctatgatgagaagtacctgattgccacctcagagcagcccattgctgccctgcaccgggatgagtggctccggccggaggacctgcccatcaagtatgctggcctgtctacctgcttccgtcaggaggtgggctcccatggccgtgacacccgtggcatcttccgagtccatcagtttgagaagattgaacagtttgtgtactcatcaccccatgacaacaagtcatgggagatgtttgaagagatgattaccaccgcagaggagttctaccagtccctggggattccttaccacattgtgaatattgtctcaggttctttgaatcatgctgccagtaagaagcttgac

SEQ ID NO: 34413 - DNA, 479 bp, Homo sapiens
  misc_feature (1)...(479): n = A,T,C or G
tttgacaccctagtgatgacactcgcagcnngcgcacgaggggccctggagatgaggtggctcggggcattgctggagaaaagtttgacatcgtcaagaaatggggcatcaacacctataagtgcacaaagcagctgttatcagaacgatttggtcgaggctcacggactgtggacctggagctagagctgcagattgagttgctgcgtgagacgaaacgcaagtatgaaagtgtcctgcagctgggccgggcactgacagcccacctctacagcctgctgcagacccagcatgcactgggtgatgcctttgctgacctcagccagaagtccccagagcttcaggaggaatttggctacaatgcagagacacagaaactactatgcaagaatggggaaacgctgctaggagccgcgaacttctttgtctctagcatcaacacattggtcaccaagaccatggaagacacgctcatgacn

SEQ ID NO: 34414 - DNA, 432 bp, Homo sapiens
  misc_feature (1)...(432): n = A,T,C or G
naagaaaactgttatgatcgtagaacacgccagcttggcacgaggggaagctccaggctcgggatgtgtcctgagcacctgtcccggccccctcctctccagcctgtcaggccagcctccccagcccccttccctcaactctaggggcagcatagccccaggccaccctagcccagcccctgcattgccgtttccccagagggggcccctccacctctgctctgacctctccccatctctctgcccctccttttctcacaagtgccatgagttttcaaacatcttcgggtctcagcctgctgctgccatgaactttgttgggttaagggggaggggctctaggaaggaactggggggaaggggacaggtaggtggctggagggaccctttttgctgctagaaagcccctcccttctcccggggagctggggc

SEQ ID NO: 34415 - DNA, 485 bp, Homo sapiens
  misc_feature (1)...(485): n = A,T,C or G
cttgacaacccttatataaaatcgttcggaccangcccacgccaagcttggnacgagggctgaatacgctaagcctggaagccatcctgcccttctgacccaaatcaaaacatcacattccagtctgaagtgcctactggggggctttggcctgtgagccattgtccctctttggaacagatatttagctctgtggaattcagtgacaaaatgggaggaggaaagagagtttgtaaggtcatgctggtgggttatctaaaccaagaaggagaccttttcacaatggaaaacctgggggatggtcagagcccaatcgagacctcacacacgggtgtccctcatggagacctcatgccatggtctttgctaggcctcttgctgaaagccaaggcagctcttctggagtttctctaaaggcactagtgaacaattcggtggtaaaagttccacacaaactatgggattcaaggggcagtcttgcaaca

SEQ ID NO: 34416 - DNA, 446 bp, Homo sapiens
  misc_feature (1)...(446): n = A,T,C or G
ggnnngnaattgannactgttatgatgggatcacgccaagcttggcacgaggcacatagtcagcagaggtttgagaagggagaatttagtgaagtgagaagttcccatgaaagcagcaagatcaagatcacagacaccttgaaacaaaaagccaggaataacttccaacccaagaggagaacagagaggcctcaaaaccaaaggtaggataagaaacttgtagcccaagagttatcttccagacaaagaagcctgagattccaacgcagcttcagagagtgctcactcaaaatgttactgaaactgtaggctttttaatgagttagccatgcctgcaaaaggcattccctaaggtggcacagaagacggagcccccatatccaaagatagccaaggagaaagaaagacccctgttgccagagccagtgggcaaaggcaacagaaat

SEQ ID NO: 34417 - DNA, 470 bp, Homo sapiens
  misc_feature (1)...(470): n = A,T,C or G
agaggccnnnnncctgagactgagacagtatcacctgcntacgccagcttggcacgaggagaagatgctgccaataactatgcccgagggcactacaccattggcaaggagatcattgacctcgtgttggaccgaattcgcaagctggccgaccagtgcacgggtctccagggcttcttggttttccacagctttggtgggggaactggttctgggttcacctcgctgctcatggaacgtctctcagttgattatggcaagaagtccaagctggagttctctatttacccggcgccccaggtttccacagctgtagttgagccctacaactccattctcaccacccacaccaccctggagcactctgattgtgccttcatggtagacaatgaggccatctatgacatctgtcgtagaaacctcgatattgagcgtccaacctatactaacctgaataggttaataggtca

SEQ ID NO: 34418 - DNA, 473 bp, Homo sapiens
  misc_feature (1)...(473): n = A,T,C or G
agggccggggnnctggcaactgataccgatagaaccccttcttcgccagcttggcacgaggctgctctacaaagtaccttatgtagcccaagaaattcaagaggaaattgatgagctccttcaggagcagcgtgcagatatggaccagttcactgcctcaatctcagagacccctgtggacgtccgggtgagctctgaggagagtgaggagatcccaccgttccaccccttccaccccttcccagccctacctgagaacgaagacactcagccggagttgtaccacccaatgaaaaaaggatctggagtgggagagcaggatgggggactgatcggtgccgaagagaaagtgattaacagtaagaataaagtggatgaaaacatggtcattgacgagactctggatgttaaggaaatgattttcaatgccgagagagttggaggcctcgaggaagagcgggaatccgtgggcc

SEQ ID NO: 34419 - DNA, 403 bp, Homo sapiens
ccggagggcgaaattggggcttcttctgctctggtgacccaaaaccgtcaactgaaatgaccctgtctgtgtaatactccggcaggatgggcctcggagcgtaaaggcggcaaaaataaaaatattaaaaaaaaggagagagggaaaaaaaaaagaaaacccgaaagtttcagttgcattgctgcggaacgttttttagcccaaaggcgaaagaaaaaatcggaagtgacgtcgcggccaaaacaagcccgggcttggaggcctgtactgaaactggcctcaaatgggaaggcccaactcgctgtctgctgtcgtcggtggtcgcgaaaccttgcacttttaccgggtcggcctccagcccctgtgcccgggatccgctcgccgcggatgaccgagagtttct

SEQ ID NO: 34420 - DNA, 399 bp, Homo sapiens
  misc_feature (1)...(399): n = A,T,C or G
ggcggcttctttttttccctccccccccttnccccccccacagctgcctccatttccttaaggaagggtttttttctctctccctcccccacaccgtancggcgcgcgagcgggccgggcgggcggccgagttttccaagagataacttcaccaagatgtccagtgataggcaaaggtccgatgatgagagccccagcaccagcagtggcagttcagatgcggaccagcgagacccagccgctccagagcctgaagaacaagaggaaagaaaaccttctgccacccagcagaagaaaaacaccaaactctctagcaaaaccactgctaagttatccactagtgctaaaagaattcagaaggagctagctgaaataacccttgatcctcctcctaattgg

SEQ ID NO: 34421 - DNA, 394 bp, Homo sapiens
ggggtcagaagtttgagaccagcctggccaacatggtgaaaccccgtctctactaaaaatacaaaaagtagccaggcgtggtggcgtgtgcctgtagtcccagctacttgggaggctgaggcaggagaatagcttgaacctgggaggtggaggctgcagtgagttgagactgcaccattgcactccagcctgggtgacaaagcaggactccgtctcaaaaaaaaaagaaaagattcatgatgctgctgctcccaaaaggtttgctggatgtgtttacataggactctaacttgggtgcactacagttgttcaccagggccagtgattcaccccagtgtgtggccaaaccatgactgtgtatcaggaatgttttaatttgggcttccttagtaaa

SEQ ID NO: 34422 - DNA, 378 bp, Homo sapiens
ggggaaaaggttctgattgagggctccatcaactctgtccgggtcagcattgctgtgaaacaggctgatgagatcgagaagattttgtgccacaagttcatgcgcttcatgatgatgcgagcagagaacttctttatccttcgaaggaagcctgtggaggggtatgatatcagctttctgatcaccaacttccacacagagcagatgtacaaacacaagttggtggactttgtgatccacttcatggaggagattgacaaggagatcagtgagatgaagctgtcagtcaatgcccgtgcccgcattgtggctgaagagttccttaagaatttttaaaccatctggctggatctcgtggccttccccctcagactaccc

SEQ ID NO: 34423 - DNA, 389 bp, Homo sapiens
agatggggccttcgagggcgcagcctctgtgagcgagctgcacctaactgccaaccagctggagtccatccggagcggcatgttccggggtctggatggcttgaggaccctaatgctgcggaacaaccgcatcagctgcatccacaacgacagcttcacgggcctgcgcaacgtgcggctcctctcgctctacgacaaccagatcaccaccgtatccccaggagccttcgacaccctccagtccctctccacactgaatctcctggccaaccctttcaactgcaactgccagctggcctggctaggaggctggctacggaagcgcaagatcgtgacggggaacccgcgatgccagaaccctgactttttgcggcagattcccctgcagg

SEQ ID NO: 34424 - DNA, 365 bp, Homo sapiens
ggcacgagcaggatgttctaccgggactggtggaactcaacgtccttctccaactactaccgcacttggaacgtggtggtccatgactggctgtacagctacgtgtatcaagatgggctgcggctccttggtgcccgggcccgaggggtaaccatgctgggtgtgttcctggtctccgcagtggcccatgagtatatcttctgcttcgtcctgggggtcttctatcccgtcatgctgatactcttccttgtcattggaggaatgttgaacttcatgatgcatgaccagcgcaccggcccggcatggaacgtgctgatgtggaccatgctgtttctaggccagggaatccacgtcagcctgtactg

SEQ ID NO: 34425 - DNA, 377 bp, Homo sapiens
  misc_feature (1)...(377): n = A,T,C or G
ggcacgggtcacactacaaccatagcccttaaaggcgagaaggaatttgctgctttaatgaacttaaaaatgccagatattcgtactgtcctgtgaggtttctgcaaacgggaacatgtggatgcaacatggcttcatcttccttacatgatggtactagtttatctattaaaatgcttcttgttagtaaggctaggtaatctcttcccatcacagttgcttccctcttgttcagtaaagttataaagaccacccctaacagagggcgggtttggggttttaattctgatcaaacccttgtgaaagcctccattttctgtggcaaagcaggtgaattaacaaattctaaagccagactatatttttacataacctgn

SEQ ID NO: 34426 - DNA, 434 bp, Homo sapiens
  misc_feature (1)...(434): n = A,T,C or G
attgagnacgtcttgattggagtacgtccagcttggcacgaggcgaccgcctaagagtcgcgctgtaagaagcaacaacctctcctcttcggctccgccatcagctcggcaggcgcgaagcagcaaccatgcgtgagtgcatctccatccacgttggccaggctggtgtccagattggcaatgcctgctgggagctctactgcctggaacacggcattcagcccgatggccagatgccaagtgacaagaccattgggggaggagatgattccttcaacaccttcttcagtgagacgggggctggcaagcaagtgccccgggcagcgtttgtagacttggaacccacagtcattgatgaagttcgcactggcacctaccgtcagctttttcaccctgagcaacttatcacaggcaaagaagatgcttgcaatacn

SEQ ID NO: 34427 - DNA, 402 bp, Homo sapiens
gatatcatcgatgtaaatagtttgttgaagaataaatatttaaaataaaagattgctggatttccatttatcactacagtacgggtctcaggactctggaaaaggaaaatatatctttctcccaaaatctggagataaaatttcacttgcaatttttatgaaagttacaaggggctttaaaagttttgatcaatccccccacttcccctctcctatgagagacaatttagtgagggacaaatagaggatgatacccctggggtgaggggagggaacagaagggctgaacatggagcctggctggcattagcttgaggaaccacagcgtgattccctttagaggaaatagggtcaggggctgcagagacaaaaaatggaggttcattgcagatgagggacagg

SEQ ID NO: 34428 - DNA, 417 bp, Homo sapiens
ggcctcaacactgtctataccatagatgacagaacccgagctagcctatctgagcagagaaatgctatgagccttttgtctaagaactgatgcaaaacttggatgcgcccttttacttgaactgaagatagcactggagagactacctagaccagatggcctggataaacaagagaggggcctccgaatggagaaagaataaggcagattatccttctttgcagaagatatgatctcatgtttggaaaacctaaagactccaccaaaaaactattagaactaataaacaaatttagtaaaactgtgggatataaaatcaacatatgaaaatcattagcatttctacatcctgacagcaaacaatctgaaaaagtcaagaaactaatcatatttacaatagcttcaaataaaatgaag

SEQ ID NO: 34429 - DNA, 412 bp, Homo sapiens
  misc_feature (1)...(412): n = A,T,C or G
ggcagcggatgagtctctttctgcacataaataaaaggaaaagaaacaagcaattttggatgaaaatgcaaatggaaaaatacacataaccagttatctactataatggtttttatataaaatggttcctgatttattttcagccagtaatcaaaacagactgggaatgaataaagcacttacagaagagtatcctaatgaaaacactttaaaacagattgggaaaactgagcatgtgtcctgttttaagtggtggactgggagggaagtgtcaacttctgaggtctttatttacatgataatctgggagatgcatttatgcctgaatcaaagctgccttctgctcaaacaaatcagatttatttcacattcttccattattccattttcctgctggtcctgtgacttggan

SEQ ID NO: 34430 - DNA, 467 bp, Homo sapiens
  misc_feature (1)...(467): n = A,T,C or G
aggggcgagggctcgccccagggagcctaganaatcttgcgccaccttggacgagggacagcgtgaggtgacccatctggcccgccgcgatgctggcaacacggcggctgctcggctggtcgcttcccgcgcgggtatctgtgcgtttcagcggcgacacgacagcacccaagaaaacctcatttggctcgctgaaggatgaagaccggattttcaccaacctgtacggccgccatgactggaggctgaaaggttccctgagtcgaggtgactggtacaagacaaaggagatcctgctgaaggggcccgactggatcctgggcgagatcaagacatcgggtttgaggggccgtggaggcgctggcttccccactggcctcaagtggagcttcatgaataagccctcagatggcaggcccaagtatctggtggtgaacgcagacgagggggagccgggcacctgcaag

SEQ ID NO: 34431 - DNA, 468 bp, Homo sapiens
attgacagcgctttacatgacacgccagcttggacgaggctttatagaaggaacacctgcaaggtaccccacatagttggggccactcttttttctgtcccttatgagttacagaacagggagtctgctggagacacaaagccagcagtaagggccctttagcctgtctcctgttctctgaagctccctgccgaggctccctcacgcccagaggacacatctccccttcttctctagatggtaatgtagggcctcagatgtggcatgtcaacactcccatggggaatttatgaccatagagatagtagaaacctaaatattttcagaaaaaaaattttttttgcaggatttccaatttatctttgaaaagacagtacaatcatgtttgaatgtctgatgaaagtgtcttatttttaggtttgcaaaaaatgctactttcttattctcattcttatgtaagatgactat

SEQ ID NO: 34432 - DNA, 470 bp, Homo sapiens
  misc_feature (1)...(470): n = A,T,C or G
ggggcgagggccgcccctgaaangcctagngacctatgcaccaccttggncgagggggcattctctgccagggacccatgagcaggctgcatggtctagaggttgtgggcagcatggacagtcccccactcagaagtgcaagagttccaaagagcctctggcccaggcccctccgtgggacagccccgccgcccctccccaccagggctttgcagatgtccttgaaagacccaccctagagccctttggagtgctggcccctcctgtgccctctgccctggtggaagcggcagccacaagtcctcctcagggagccccaagggggattttgtgggaccgctgcccacagatccaggtgttggaagggcagcgggtaaggttcccaagccagccccaacacccttcccacttggcacccagagggggctgtgggtggaggcctgactccaggcctctcctgcccacaccct

SEQ ID NO: 34433 - DNA, 441 bp, Homo sapiens
  misc_feature (1)...(441): n = A,T,C or G
ntttgaaaacagtttgaccatgattaaacctagcttggcacgaggggggggctgtcggggaaccatggctgccccgagagacaatgtcactttattattcaagttatactgcttggcagtgatgaccctgatggctggagtctataccatagctttaagatacacaaggacatcagacaaagaactctacttttcaaccacagccgtgtgtatcacagaagttataaagttattgctaagtgtgggaattttagctaaagaaactggtagtctgggtagattcaaagcatctttaagagaaaatgtcttggggagccccaaggaactgttgaagttaagtgtgccatcgttagtgtatgctgttcagaacaacatggctttcctagctcttagcaatctggatgcagcagtgtaccaggtgacctaccagttgaagattcg

SEQ ID NO: 34434 - DNA, 380 bp, Homo sapiens
atgtggagagcaaacacaaaaagatttaggttacgccgggtgcagtagctcacgcctgtaatcccagcactttgggaggcctaggcgggtggatcacctgaggtcaggagttcaagaccaatctgactaacacggtgaaaccccatctctactaaaactacaaaacttaaccgggcatggtggtgcgtgcctgtaatcccagctactcggggggctgagacaggagaatcccttgaacctgggaggcggaggttgtggtgagccaaaatcgtgccactgcactccagtctgggtgacagagtgagactccgcctcaaaaagatttaggttgcaaatgtttcaagcatgtgcagttttgtgtgttgtatacatatatatgg

SEQ ID NO: 34435 - DNA, 383 bp, Homo sapiens
ggcaaatagcaatgtgtatgcacattctctttagttaaggcaccaattgttttggttggttttcctaagacatactttaaaaagatgttctataaatttcctagttaaattatggggattttggagtatgtacatgataaattataatacgtatatggttgaagttattttattttttactaatgaattattttaatattccttattgaataaatgctgtaacttgtttgctatggaacttattcttaaagttctagttaaaaataatttttccacatgcatgaaaatatgtattaatcagaggtggcttaattacattgaaattgcttttttgttggtggttttttactgaaataactcatgtttgtgtagaagaatgcctg

SEQ ID NO: 34436 - DNA, 474 bp, Homo sapiens
  misc_feature (1)...(474): n = A,T,C or G
agtgaggnggnnnccgctacagataacttacagaatactctcttacgccagcttggcacgagggttttctcagaactgaacacagcctcctaattccatcctcttgactagggcttacaatactgagagcgattacaggctgtaataagttaaaggtccctgagcgtggctttcttgttctgcgcctctaattaattcttctattaaaagaagctttccttctcactgcagcttacagaaaggctacaagctttaatcacagatcatttcatttgccagagcctttccttttctaactcctttagaaataagatttccctctctgtttggaatctctggatacaggactctcctccaagctcatggcttgattggctttgcctgtgcacacacacatcagtttgccttaaacttggagctatggggagtcccagattttccagcttagtgggggaagtttagctgtcacctacc

SEQ ID NO: 34437 - DNA, 485 bp, Homo sapiens
ctcctcccgtttgacattgattaccctcgctaggcacgaggaggttaataggtcaaattgtggcctccatcactgcttccctgagatttgatggagccctgaatgttgacctgacagaattccagaccaacctggggccctatccccgcatccacttccctctggccacatatgcccctgtcatctctgctgagaaagcctaccatgaacagctttctgtagcagagatcaccaatgcttgctttgagccagccaaccagatggtgaaatgtgaccctcgccatggtaaatacatggcttgctgcctgttgtaccgtggtgacgtggttcccaaagatgtcaatgctgccattgccaccatcaagaccaagcgtaccatccagtttgtggattggtgccccactggcttcaaggttggcatcaactaccagcctcccactgtggtgcctggtggagacctggccaaggtacagagagctgtgtgg

SEQ ID NO: 34438 - DNA, 423 bp, Homo sapiens
ggcagccctatcatcaaatgtgttaccaagacatcttggatcccctgctacttcagtgcctggaatgggtcttcatcctccaggtccacctttagcaagacctattctcccccgagaacgaggtgctttggatagaattgttgaatatttggttggtgatggtccacaaaacaggtatgcacttatatgtcagcagtgtttttctcataatggcatggctttgaaggaagaatttgaatacattgcttttcgatgtgcctactgttttttcttgaaccctgcaagaaaaaccagacctcaggctccaagacttcctgagtttagttttgagaagaggcaggtggtggaaggttcaagttcagttggtcccttgccatcaggaagtgtgctttcatcagacaaccagtttaatgaagaatcttt

SEQ ID NO: 34439 - DNA, 427 bp, Homo sapiens
  misc_feature (1)...(427): n = A,T,C or G
ggggaacttgcagtgatataattgacaacattatttaacaataataagtaaaggaggccgggtgtggtggctcacgcctgtaatcctagcactttgggaggccgaggtgggtggattacaatgtcaggagttctagaccagcctggccaatatggagaaaccccgtctcttctaaaaaaatacaaaaattaaccgggtatggtggcgcatgcctgtagtcccagctactggggaggctgaggcaagagaattgcttgaactcgggaggcggaggtcgcagtgagccgagatcgtgccactgcactccagcctgggtgacagagtgagactttgtctcaaagaaaaaaaaacaatagtaggtcaagtatttaaggaattctcagatgccttatggacctcttcaagaatgtggttagccaattgattn

SEQ ID NO: 34440 - DNA, 443 bp, Homo sapiens
taaatttgaatacagtcgtaacccctattacgccaagcttggcacgaggggagtaacaattgatgagcaatattcaaagtgaagtaaatctggaaatggtagactgtgttgggattggggggagggccatgggaggggtacatcgtcaacatagccgatcctgttacatttaagagtagcctcgcaggttgaatttcttctggtagcttcatggtaaatgcatccgaataaaccatactggattgcagggcttgcttctgtagggtggttaaggacttgacttcctttctcccatgattcctctggactgcacacagcacccacaaccagccccatgcatgctgctgcctctgggcagtcgtagaatctcccacttcagtttctcgttgattgtactcacctttatggaatccaaatacatccaaaagggtaaggcagtttta

SEQ ID NO: 34441 - DNA, 488 bp, Homo sapiens
  misc_feature (1)...(488): n = A,T,C or G
ggcccaggccgggtcnnnnnaaatgaaaactgacgacgtacgacancanacgccagcttggcacaagggcgcatctcccctggctgacttacttccctcttataaagacctttgtgggccaggcatggtggctcacacctgtaggccgagctctttgagaggccaggccaggtggttcacttgaggccaggagctcaagactagcctggccaacatggcaaagccctgcctctactaaaaatataaaaattagctgggcatggtggtgcatgcctgtaatcccagctacttgggaggctgaggcaggagaatcacttgaacctgggaggctgaggctgcagtgattctcctgcctctactaaaaatataaaaattacctgggcatggaggtgcatgcctgtaatcccagctacttgggaggctgaggcaggagaatcacttgaacctgggaggcttaggctgcagtgagctgagagagcaccactgcn

SEQ ID NO: 34442 - DNA, 426 bp, Homo sapiens
gggcaggagtcagtaccatcccaatctggcaaaacaagccacatggggctgctcgaagtgtagtaagaagaattgggaccaacctacccttgaagccgtgtgcccgggcgtcctttgagaccctgcccaacatctctgacctgtgtttgagagatgtgcccccagtccctaccctggctgacatcgcctggattgctgcggatgaagaggagacatatgcccgggtcaggagtgatacgcgccccctgaggcacacctggaaacccagccctctgattgtcatgcagcgcaatgcctctgttcccaacctgcgtgggtccgaggagaggcttctggccctgaagaagccagctctgccagccctaagccgcactactgagctgcaggacgagctgagccacttgcgcagccagattgcaaagatag

SEQ ID NO: 34443 - DNA, 412 bp, Homo sapiens
ggcctattgacttcctcacgggagtctgttctcctatggttgataaagctttaaatactatttaaagtggttctggtctggacttactagcacttccctgaacagtctcaaaatagcctaaacataagaaaacaatcctgcaaagtaaaggtttttacaagcagagatgaaggaaagggagcagcagctgaccatcaaatgtggtatcaggtagctggaagaggatccaggacccatcagggaagcaacgactgtacttagcaatttgggttataattacaaaaaagaaaaaatagtagaaaggatctttaccagacagtaaggtcatggtacaaatcaggtgagtgaatgttggtcacaggtagcctgacactctgatgaggacttcaagatgagaatgagaaaaatgtct

SEQ ID NO: 34444 - DNA, 426 bp, Homo sapiens
  misc_feature (1)...(426): n = A,T,C or G
gggctcagccaggtgccgtggtggccttggctaggacccatagccacactggagactgcgccgactccctcctttcgggcctgctctaatgaggagtgcctaagccaggacccataaactcaaagttgatggtgagaggaggccgcctgagtcaggacacctggcttcttgaaaagttcgctctgccagaaaccacctagggaccacgttagctgccttccttgagctccccaggagtcggattccacatctgtgaagtggagggctggtgtggaggtgctcatggggtgcggtgcttgggagacaggcaggcccaaggtggctgctggttcctgctacgtgggggaggtgagacagatctggaaagccgtctccctcaccaggtttcattttatgctttatactcgcgagactgggggcttgntt

SEQ ID NO: 34445 - DNA, 455 bp, Homo sapiens
  misc_feature (1)...(455): n = A,T,C or G
ntttgaaaacctttgatgacattattacgccacgcttggcacgagggaggaggcgatacagtgggacagttaggaatgcacccggggcctcctgcagatttcggaaattggcaagctacgggattccttcctgaaagatcaactgtgtcttaaggctctccagcctatgcatactgtatcctgcttcagacttaggtacaattgctcccctttttatatatagacacacacaggacacatatattaaacagattgtttcatcattgcatctattttccatatagtcatcaagagaccattttataaaacatggtaagaccctttttaaaacaaactccaggcccttggttgcgggtcgctgggttattggggcagcgccgtggtcgtcactcagtcgctctgcatgctctctgtcatacagacaggtaacctagttctgtgttcacgtggccccn

SEQ ID NO: 34446 - DNA, 410 bp, Homo sapiens
ggccctaccacggggaaagcatcagcatgctgattgcactgccgactgagagctccactccgctgtctgccatcatcccacacatcagcaccaagaccatagacagctggatgagcatcatggtgcccaaaagggtgcaggtgatcctgcccaagttcacagctgtagcacaaacagatttgaaggagccgctgaaagttcttggcattactgacatgtttgattcatcaaaggcaaattttgcaaaaataacaaggtcagaaaacctccatgtttctcatatcttgcaaaaagcaaaaattgaagtcagtgaagatggaaccaaagcttcagcagcaacaactgcaattctcattgcaagatcatcgcctccctggattatagtagacagaccttttctgtttttcatg

SEQ ID NO: 34447 - DNA, 425 bp, Homo sapiens
ggcacgagctaacagtggctgcagctgaccgtgggcagccaccccaaagctcagtcgtgccagtcactgtcactgtactagatgtcaatgacaacccacctgtctttacccgagcatcctaccgtgtgacagtacctgaggacacacctgttggagctgagctgctgcatgtagaggcctctgacgctgaccctggccctcatggcctcgtgcgtttcactgtcagctcaggcgacccatcaaggctctttgagctggatgagagctcaagcaccttgcgactggcccatgccctggactgtgagacccaggctcgacatcagcttgtagtacaggctgctgaccctgctggtgcacactttgctttggcaccagtgacaattgaggtccaagatgtgaatgatcatggcccagcctttccactg

SEQ ID NO: 34448 - DNA, 496 bp, Homo sapiens
  misc_feature (1)...(496): n = A,T,C or G
nctagataacgtttgacctgatacgccatttgggacgatgcctcgtgccaagcttggcacgagggaagagtgtgcttgtcatctgccactttcgggagggtggatccactgtgcaggagtggccggggaagctggcagcactcagtgaggccgcccggcacacaaggcacgtttggcatttctctttgagagagtttatcattgggagaagccgcggggacagaactgaacgtcctgcagcttcggggcaagtgagacaatcacagctcctcgctgcgtctccatcaacactgcgccgggtaccatggacggccccgtcagccacacctgtcagcccaagcagagtgattcaggggctccccggnggcagacacctgtgcaccccatgagtagtgcccacttgaggctggcactcccctgacctcacctttgcaaagttacagatgcaccccaacattgagatgtgttttaatgtaaaatattgatttctacgtta

SEQ ID NO: 34449 - DNA, 427 bp, Homo sapiens
  misc_feature (1)...(427): n = A,T,C or G
ggcacgagcaataagctcctagtccagacgccatgggtcatttcacagaggaggacaaggctactatcacaagcctgtggggcaaggtgaatgtggaagatgctggaggagaaaccctgggaaggctcctggttgtctacccatggacccagaggttctttgacagctttggcaacctgtcctctgcctctgccatcatgggcaaccccaaagtcaaggcacatggcaagaaggtgctgacttccttgggagatgccataaagcacctggatgatctcaagggcacctttgcccagctgagtgaactgcactgtgacaagctgcatgtggatcctgagaacttcaanctcctgggaaatgtgctggtgacccgttttggacttcnttttctctttaaaaaaaaaaaccacgccgcgggggggtgggc

SEQ ID NO: 34450 - DNA, 459 bp, Homo sapiens
  misc_feature (1)...(459): n = A,T,C or G
nttgacaaccctgagtatcatcgtaaccaccacttcgccaagacttggtacgagggaaagaacgagaaagaaaaggattgccagagaacgttatgggtttaccgaaagttctggtgagataccgggagagaaaaagagagagcagggtggggtaaggaggagaaaataaaccaacaattaggtctgcattttctcaggcagtaggcattctttagtctacataggcaaagttttccatttttgtcagtctgagtcatcaaaaagagtcttaattttctaaaacaagttggctagaagaaagttaaaagaacaacacttgttatgagggcatgtgatattttcacatcttaattaagctccttcagtttgaaggctgcacactgacataatgtagtgagtgtagactggccatgcaagtggtttgggccccattcagaactctcagactctaaacacacg

SEQ ID NO: 34451 - DNA, 470 bp, Homo sapiens
  misc_feature (1)...(470): n = A,T,C or G
aggagcnagggccccccctgaaaatcctggganaccaggacctcatacgccagcttggcacgagggtagaaagctcccacagtttaagtacagaaagactgtgtggcctcgagcatataatctaaccaacttttccagcatgtttactgattcctgtgactgctctgagggctgcataaacataacaaaatgtgcatgtcttcaactgacagcaaggaatgccaaaacttcccccttgtcaagtgacaaaataaccactggatataaatataaaagactacagagacagattcctactggcatttatgaatgcagccttttgtgcaaatgtaatcgacaattgtgtcaaaaccgagttgtccaacatggtcctcaagtgaggttacaggtgttcaaaactgagcagaagggatggggtgtacgctgtctagatgacattgacagagggacatttgtttgcatttattcag

SEQ ID NO: 34452 - DNA, 424 bp, Homo sapiens
  misc_feature (1)...(424): n = A,T,C or G
ggcacgaggagggtatcaataagctcctagtccagacgccatgggtcatttcacagaggaggacaaggctactatcacaagcctgtggggcaaggtgaatgtggaagatgctggaggagaaaccctgggaaggctcctggttgtctacccatggacccacaggttctttgacagctttggaaacctgtcctctgcctctgccatcatgggcaaccccaaagtcaaggcacatggcaagaaggtgctgacttccttgggagatgccataaagcacctggatgatctcaagggcacctttgcccagctgagtgaactgcactgtgacaagctgcatgtggatcctgagaacttcaagctcctgggaaatgtgctggtgaccgttttggcnatccatttcggcaaagaatcacccctggagtgaggc

SEQ ID NO: 34453 - DNA, 404 bp, Homo sapiens
ggatttaaatttttatttttttgaggcagtatcactctgtctctcaagctggagtgcaatggcgcaatcaactcactgcagccttgaattcctgggcacaagtgatcctcccaattcagcttctcgggtggctgggactacaggtgtgcaccaccatgcctggctgaattttttttttaaaaaatggactcttgctgtgctgtccaggctcgtgtcaactcctggcctcaaatgatcctctttcctaggccttccaaagtgctgggattacagacgttagccactgtacccagcctagttcaagttttaagcattaagaattgactctttggaggaatagggatcttttaaggatctctacagtcagtgactctaaatgtagtgtttggaccagtaagtagcat

SEQ ID NO: 34454 - DNA, 411 bp, Homo sapiens
ggctgggaggttcccgagcgggacatccccaccacggggcaagactcggactggaacttttcaaaatgctggtcatcaaaggagattttagcagttcccgactggcggacgccagagccataatcaggggcctcttcatcggctgagatggcctggacggccacgcggaggaagcccttcacctcgcccttctcgctgacgattgccacacggtgtaccaggggaacggggtacagcaggttgctcaggtacacgaaggccctgcccaccagccggaaccaggggaagcggtcatagaaggggtctccgccggtcaccacgttgtcacagtcctcgatgacactggagggcacctctgcagcgcggtcgtacatctcccgcatcaggtccagacgctgcctgagcttctcc

SEQ ID NO: 34455 - DNA, 441 bp, Homo sapiens
ggttttggtagaattctctgatcccctacctccaatctgaattaggtctttcatgttttcctcacttggctcagtcttctacacctttacatagttgtatttttatatatttgtttaatgtctgactgtcaactccatgagagtgagaatcatgtctatttccttcactataatttatcctctgcctggcacatagtgggtgctcaagaatggcagcttcatcactaactccataaacaacacgcaattgtaagttactgtttcttgctcgatcaagaaagctcagattatttcagaatttgctgacaaactaatctctacaactttaaaacgttccaagaactgtattaaaagagtttctatagttgagtttgcccttcaaagtaagagagatttagagtgtgggataaaataagagtaagaagagagtaaatgattggg

SEQ ID NO: 34456 - DNA, 387 bp, Homo sapiens
ggtggcacgaggttcagggattggcttgggccttctcattatttctattttaggacaagtgaaacagcctcgaaaaaagggcatggcttgcaaaaccgcttttaataaaaccgggctccaagaagtgtttgatcctcctcattatgaactgttttcactaagggacaaagagatttctgcagacctggcagacttgtcggaagaattggacaactaccagaagatgcggcgctcctccaccgactcccgctggattcacgaccaccactgtgggtcgcatgcctccagcgtcaaacaaagcaggaccaacctcacttccatggaacttgctttccgaaatgactttgcacaaccacagccaatgaaaacatttaatagcaccttcag

SEQ ID NO: 34457 - DNA, 410 bp, Homo sapiens
  misc_feature (1)...(410): n = A,T,C or G
ggcctgttcgacagtcagccgcatcttcttttgcgtcgccagccgagccacatcgcttagacaccatggggaaggtgaaggtcggagtcaacggatttggtcgtattgggcgcctggtcaccagggctgcttttaactctggtaaaggggatattgttgccatcaatgaccccttcattgacctcaactacatggtttacatgttccaatatgattccacccatggcaaattccatggcaccgtcaaggctgagaacgggaagcttgtcatcaatggaaatcccatcaccatcttccaggagcgagatccctccaaaatcaagtggggcgatgctggcgctgagtacgtcgtggagtccactggcgtcttcaccaccatggagaaggctggggctcatttgcaggggggn

SEQ ID NO: 34458 - DNA, 411 bp, Homo sapiens
  misc_feature (1)...(411): n = A,T,C or G
gatcagtttcttagaaaaagctttcctgaatccctctgacgttgcctgggatctttctgttgattcgtcttttctggagattgggacagagcatctgtggtccagggaagttagtcctctggcctcaattctgttgtggatgtgcagtgataagcgggcattgcgtgcctcgggggatgcctagttcgtggcttcctggctgttttgtccttctgtgtcttgtagctgtagggtgccagctcatggagtggggtgttggcggcgtttccgcggttggcctccttgctttgccgcacctccaggttctgggcatgagaggccgtggcctcatttctggtggataacctttttagtttaatagcatctttaattagatcacagcattgaattcaaaatttcttctgcaaagan

SEQ ID NO: 34459 - DNA, 401 bp, Homo sapiens
gggccatctctggaacctaaaacaaaaaacatgagttgtgtgccatggaaaggagacaaggccaaatctgaatcattggagctgccccaggcagcacccccacaaatctaccatgagaaacagcgcagggagctttgtgccctccacgccctcaataacgtcttccaggacagcaatgccttcacccgggatacgctggaagagattttccagaggttgtctccaaacaccatggtgacacctcacaagaagagcatgctgggaaatggcaactacgatgtgaatgtcattatggcagcacttcagaccaaaggctatgaagctgtttggtgggacaagcgcagggatgtcggtgtcattgccctcactaacgtcatgggcttcatcatgaatctgccctc

SEQ ID NO: 34460 - DNA, 408 bp, Homo sapiens
ggcccttcagctcactgttcaaaaagtagtgggtctctggattcatccaaagtctacatcgtgtctcacagcagcggacaacaggttcccgggtccatgtccaagccctaccacagacaaggggcagtgaacaaatatgtcatcggctggaagaaatcggagggcagcccaccgcccgaggagcctgaagtgactgaatgtcccgggatgtatagtgagttggatgtcatgtccacagcaactcagcatcaaacagtggtgggagatgctgttgcagagactcaacatgttctgtctaaagaagattttctgaaattgatgcttcctgacagccccttagtggaggaggggcgaagaaagttttcgttctatgggaacctgtctccaaggaggtcgctttaccgcacg

SEQ ID NO: 34461 - DNA, 432 bp, Homo sapiens
  misc_feature (1)...(432): n = A,T,C or G
ggctcatctggggcgctctatggcctgttcctgactgcggctgcacagcccctgaaggccaagaccagcctcccagcctggtctgctgccatggatgccggcctggaagccatgcaaaagtatggcaaggctgctccaggggacaggactatgctggattctctgtgggcagcggggcaggagctccaagcctggaagagcccaggagctgatctgttacaagtcctgaccaaagcagtcaaggtgagtgaggctgggcccagccacctggggagacaggcttctagccagcagactcctgtctccatgtgaccctgagcaagttaataaccttcctggaccgcagtttccttctctgtacaatggagatgagcacctatctcanaaggtggttatgtggctaaggaaatatgtagagccccgcacactgcc

SEQ ID NO: 34462 - DNA, 428 bp, Homo sapiens
ggcacagctcttcaagcttaccaaggacaggcagaaccccgtcccctgctcacacagctcttcaagcttaccaaggacaggcaggaccccgtcccctgctcacacagctcttcaaacttaccaagtgccctctcccctgttgagggcacagcaaccccaggccctccctcccacctcagctgaagccccaatcttccaaatcggaaccagcaagtcttagggctggcacgcatctgggcctctagctgagaacccggactctcaggcacctcagtgcccctgccccagggcagaggcccaccccgtgggttggtgcagtggctgccctgggctccacgggcagcacagggagtctgtccaggaagcagcccagccggggtcagtattccgtggagccagtcctgagctgggaggggcatttaacaccc

SEQ ID NO: 34463 - DNA, 455 bp, Homo sapiens
atttgaaaacgtgatgacatcattacgccaagcttggcacgagggcatgaggagctggatgcacaagagttggccaagagaatcaattaggaatctggatccttggcctttctctcaaactccctgaagaagctcgtcccctttcagctccctgggtcgaagagtgagcacaaagaacccaaagataaaaagataaacatactgattcctttgtctgggcgtttcgacatgtttgtgagatttatgggaaactttgagaagacgtgtcttatccccaatcagaacgtcaagctcgtggttctgcttttcaattctgactccaaccctgacaaggccaaacaagttgaactgatgagagattaccgcattaagtaccctaaagccgacatgcagattttgcctgtgtctggagagttttcaagagccctggccctggaagtaggatcctcccagtt

SEQ ID NO: 34464 - DNA, 407 bp, Homo sapiens
  misc_feature (1)...(407): n = A,T,C or G
ggcagtgtagccgttaaaaggggatttttgtttaatcacacagttttaaacagagatttgtggaaaaatccagttacgggtggaggggaatcggatcatcaattttcacttgcttaaaaaaaatactttttcttaaagcacccgttcaccttcttggatgaagctgtggtaacaatgcactagctcatcacgttttatgccgttttcacgaagagcgggcttgtcatctgccactttctggaggcaggatccactgtgcatgagtcaccggggaagctggcagcactcaatgaggccgcccggcacacaaggcacgcttggcatttctctttgagagagtttattattgcgagaaaccgcgcggacagaactgaacgtgctgccacttccgagcaagggatacaccn

SEQ ID NO: 34465 - DNA, 453 bp, Homo sapiens
  misc_feature (1)...(453): n = A,T,C or G
nttgaaacatgttgacattattacgcccagcttggcacgaggcagtttagcagttaaaagtgtatttttgtttaatcaaacaataataaagagagatttgtggaaaaatccagttacgggtggaggggaatcggttcatcaattttcacttgcttaaaaaaaatactttttcttaaagcacccgttcaccttcttggttgaagttgggttaacaatgcagtagccagcacgttcgaggcggtttccacgaagagtgtgcttgtcatctgccactttccggagggtggatccactgtgcaggagtggcccgggaagctggcagcactcaatgaggccgcccggcacacaaggcacgtttggcatttctctttgagagagtttatcattgggagaagccgcggggacagaactgaacgtcctgcagcttcggagcaagtgagacaatcacagctc

SEQ ID NO: 34466 - DNA, 426 bp, Homo sapiens
ggatatttaaaaattggtcaaaacaaggtctgggagtatgtttgtgtgtctttccagctttatcctgtagcgtgtctttgttctgtgttttagtgtcccatttagggagtgatgttttaagggtttttgtgtacttggattaagtaattaaaggtgagtggggggaatgggattattgaggcaatgatttttttcttcatgggctctgatagttgcattgattgttctgtattctaattgctatatttgtgtttgcataggtgaagagcaaactggtgcgttatcttgatttttaaaaagtaataaatcctatgagttccagtattaacacttgccagttctggatcctcacacccattggctgagcgcattcaagcaccaatcgaagccaggttcatctctgagctgctgaaaggaggtgtgagg

SEQ ID NO: 34467 - DNA, 457 bp, Homo sapiens
  misc_feature (1)...(457): n = A,T,C or G
nttagaaaaccngtgatgaccnttattacgcccagcttggcacgaggcggngtggctgtgccgttggtcctgtgcggtcacttaaccaatatgcctgttgaaacccagacccaagaccaaccgatggaggaggaggaggttgagacgttcgcctttcaggcagaaattgcccagttgatggcattgatcatcaatactttctactcgaacaaagagatctttctgagagagctcatttcaaattcatcagatgcattggacaaaatccggtatgaaagcttgacagatcccagtaaattagactctgggaaagagctgcatattaaccttataccgaacaaacaagatcgaactctcactattgtggatactggaattggaatgaccaaggctgacttgatcaataaccttggtactatcgccaagtctgggaccaaagcgttcatggaagctttgc

SEQ ID NO: 34468 - DNA, 406 bp, Homo sapiens
ggctcagttggcgtccaagggagtcggtagtaagggatggcgggacgtcaccacctttttttcggggaaagcagagggccccttggacagcccctcggagggccacagttatcaaaacagcggtctggaccacttccaaaacagcaacatagaccagagcttctgggagacctttggaagtgctgagcccaccaagacccgcaagtccccgagcagcgacagctggacgtgcgcggacacctccaccgagaggaggagctcggacagctgggaggtgtggggctcggcctccaccaacaggaacagcaacagcgacggcggggagggcggggagggcaccaagaaggcagtgccgccggccgtgcccactgatgatggctgggacaaccagaactggtagggcccc

SEQ ID NO: 34469 - DNA, 421 bp, Homo sapiens
ggggacatctcagcccaggttctagcccccacgcaccccagaccccaggtggaccatcctcccaaactagggccctccactctatccagggcaggccagggactccctggcctgacacatgatgcccagatttcagatttggcctccgtcacttaatccagagtacaggggctggggtcagggaaggaagatctaaagaacccactgtgggtcaggggaatgggaccagcaggacatatgggcaagctctgcaggacagacaggcagacaaaccctctgatctatgaagtctctgcagggcaaggggaccagggacctggaaccctcttggccaaggggagtgggaacgacagagggaaggtcacaggcaagggtgcctatctaagtggaactaattgcccgagggctcagcaaggccaag

SEQ ID NO: 34470 - DNA, 418 bp, Homo sapiens
ggtggcacgaggaatcctccttttaattaaaaatggattttccaggtaaaaaaaaaagggcccttatttttgccacccttaagggcctgcttagggaaggttttgggaaaaagttttaaaaatcttgagaccagtttcttttttatgatcaaaaaaaaaaactcttttgaccctttttgacggtaactcaaaaaatcgttcaagcaagctaatcccagctttgtacctaaaggacagttgtttgcagggagtttttccttaaggggggccgattttttaaaaaattttgggattttactttaccgggggggtggaaagagtttcaaattcagggatacaggttttaaaactgaagggcccactttaaaggaatatatgaaaactggcagggggtttccctttcccctcccccccttag

SEQ ID NO: 34471 - DNA, 440 bp, Homo sapiens
ggccagtgtagattctcagtccaagatggcaaaactaagctcatgcatttaaccaatgcccaccaacaccttatcttaatatccactaaaataactgaacaaatttttaaaaaattaataaataaaaacaccaagggggaaaatctgtacctccactggaaatcacagaatagcgacaagcatatgtggacggacccatgatacctccaagaaaaaaggctggcaaagcatctggttcagcactcatgttgaggattagagatgagggacagaaacacaccaggtgcagtggctcacacctataatcccagtactttgcgaggccaaggcacgtggatgacttgaggtcaggagttgaagaccaacctggccaacatggcaaaaccccatctctactaaaaatacaaaaattatccaggtgtggttgtgcacacctgtaa

SEQ ID NO: 34472 - DNA, 415 bp, Homo sapiens
ggcgcacttcctgagacactcagcgatgccctcagacagtggtttgagttggtgacagcctctgaccacccatagaacagaaagaagagtccaaagtgagacttaactgtggtcagaaggtcacattgcttacccaggtgctcccttttggacaactacaaaaaattttattgtaatatttttattttacaacgtgatcttacagcctacagaatgctctctggctcccggctttgcctgggctgaggtttttataccaaacctggaagcagcagcaggtgcctgaactcgtaactagagaagagttatccttcttccctgccttggaagccctggcctgggaggaggtcataccccaccgttggagcccagctgcctgttttcttttgcaggggatctgggcacctgtgccttg

SEQ ID NO: 34473 - DNA, 478 bp, Homo sapiens
  misc_feature (1)...(478): n = A,T,C or G
nattgagaactnttgattggaaacgctcagcttggcacgaggccgggcggccagatgggctcggagtgcagcggggttaggatggacgaggacgtgttgcaccctgaagagcctcatcatcggtgagagtggggtgggcaagtccagcctgctcttgaggttcacacatgatacctttgatccagaacttgcagcaacaatagatccatcttcggttgtgaatccggcccggaatgcagccaccccttagagcaaccccccttgctgctcgtgccctgctgtgctactgcctcagtcacttcctgcttggtcaagaccacagctgctgatgtcacagctgaggcacatcagaaaggctgcctgattcaaagaaagctgccggataaatcatagagcacagacacttctacctcatgctcttatgggactttaggaaccaaacataagcacctatggaaaatgcacggcggtcttgaan

SEQ ID NO: 34474 - DNA, 431 bp, Homo sapiens
  misc_feature (1)...(431): n = A,T,C or G
ggcctcgtgccattccgctcggccctactaattgggaagaagaagcccaagtcagatttctgtgaccgtgagcagagcctgaaggagacgttagtagagccagggagcttctcccagcagaatggggagcaccccaagccagccctggacaccggctatgagaccgagcaagacaccatcaccagcaaagtccctacggatagggaggactcacagaggatcgacgacctttctgccagggacaagccctttgacgtcaagtgtgagctgaagttcgctgactcagacgcagatggagactgaggccggctgtgcatccccgctggtgcctcggctgcgacgtgtccaggcgtggagagttttgtgtttctcctgttcagtattcgagtctcgtgcagtgctgcgtaagttagcccgcatcgtgcagacan

SEQ ID NO: 34475 - DNA, 425 bp, Homo sapiens
ggttttttcatattcatcctgcttttctagttgttcgtggcaggtaggttggtctgctactgcaagcccgttcaccaatccaccagaaccagaagggaagtgcatgacctggttttagcgagcccatgctgatgactgaggagcacctcttcccatcactaaaccatatgcacgaatgtgtcctataacattgagagggtattgacagactttttagtgagaacaagttagcatggtagcaagaacaaagactttggagtcagattcgcatttaaatccaggttccagacagctccggtggctcaagttggttggtattcaagtcttttatatctttgctgattttatgtctgcttgttctaccaatcattgagaaagggatattgaaatctctgtaattgtggatctatttctccttgtagttc

SEQ ID NO: 34476 - DNA, 493 bp, Homo sapiens
  misc_feature (1)...(493): n = A,T,C or G
gtnnaatcccggctcnnnnnncaactgataactgaatgcnttgcnnacnccaagctnggcacgaggaaaagactgtgataagcacttaattaatggaagctgctactattttcattatcataacatctatataacagctaaatgcttggcgattttctctataaaggggagctctctgggcacacggaatgtgttttagcacagttctggcacatagtagacaagcaggaatgtatattaaatgaatgaaagaatgaagcctgtcccctgggaacatcaaactcaacagttcccaaattggccttatcacatcacactcaccagatgttcccccaagtgcacattacctgtcttagtgaatgccccacagtcaccactgccagatatgggagacatcctggactcctccgtctgccacacctacgctgcctaagcaattagcaaaaccaagcctttattttagctcctgaggccatgctctccactgtactcn

SEQ ID NO: 34477 - DNA, 428 bp, Homo sapiens
ggctcaaggcaaactaagctgcctctcaacaatgagggagaactcagataaaaatattttcatacgttctatttttttcttgtgatttttataaatatttaagatattttatattttgtatactattatgttttgaaagtcgggaagagtaagggatattaaatgtatccgtaaacaaggggatgtgatctttcatgtgttagtatattcgaataatatacatatgagaggtatgcctgtccagtaaagagattgatttgtttgtatggctctggaataactcattcgtttatgaacacatctcatgtattacttgacacagtacctttggtatgtctgcttttctttcaatcctcattatctttagccctcagctggccagtacttattgctaaagaaagggagatcaatggagttgcctaccagcc

SEQ ID NO: 34478 - DNA, 421 bp, Homo sapiens
ggcaaagcgaaaagctaaggagcagtgcgctaagctgtggaaaattcccaactccagccgtgcagaaaagatgctggttctggctggacgcggtggcttacgcctgtaattccagcacttgggaggccgagtcggaaggattgcttgagcccaagagttcgagaccagcctgggcaacatggagagaccccttctctactaaaaaataaacaaaattagccgggcgtgggggcgcgctcgtgtagttccagttactccagaggctgaggtaggaggatcgcctgaccacgagttcgaggctgcagtgagcccaaattgcgccactgtaccccagcctgggggacagagcaagagaccctgtctaaaaaaaaacaaaacaaaaaccgtgctggcggtgggatcggaggaggctttcaatgcc

SEQ ID NO: 34479 - DNA, 419 bp, Homo sapiens
ggcagagggaaacccacagtgtggacagacttccttccgccctcactgcgaccgcgtgtaaatcggtgcaggtgaacggagccgccacggaattgcgaaagcccagctacgcagagatttgtcagagaacgagtaaagagcctccttcttccccattgcaaccccaaaaagaacaaaagccaaacactgttggttgtgggaaggaggaaaagaagctggcagagcccgcagagagataccgggagcccccagccctcaagtccacacctggagcccccagagaccaaaggcggccggcggggggccggccctcgccctcggccatggggaagcgtctcagccgagagcagagcactccccccaagtctcctcagtgaaaacccactgccctgggaagaactaggatgaggtattgactt

SEQ ID NO: 34480 - DNA, 495 bp, Homo sapiens
  misc_feature (1)...(495): n = A,T,C or G
cttgacaccgtttgaccatagaacgccatcttggcaccaggcaaaaactgttccttctctgccctcaaagactgaagccgcaggccctgttctgcctctgcttaggaatctgattgctcttaaagtgctcttacaagattccgtcgaagtttgctccctctgtcttatctctccttccaggattttcagacgcacaagctctgactcaggccacccagcacctggcagccttcctctgcgtgccagtgaaatctctcccagtaggtgctcaggctcttcaccctctcgttgcagcagcccctctggcccgagattgtattttctagtctgctcaagaacagaggggcctggcgaggtggaggaagggaggctccctccccggggctggccgcctcagtgatggtgatgccaccagctccagcctgcacggatggagctcacttcctaccatcacttctgctttcagtctcctcatagccttcggcagtctncncn

SEQ ID NO: 34481 - DNA, 480 bp, Homo sapiens
  misc_feature (1)...(480): n = A,T,C or G
nggaggggggggnnnnaattgannacatcgatgaacattattacgccaagcttagcacgagggaaagatgtggaatacagattgccattcaccataaacaacctgacaattaacattaatatattgcttcctccacagtttcctcaggaaaaaccagtgatcagtgtttatccaccaatacgacatcacttaatggataaacaaggagtgtatgttacctctccattagtaaacaattttacaatgcactcagatcttggaaaaattattcagagtctgttggatgagttttggaagaatcctccagttttagctcctacttcaacagcatttccttatctatacagtaacccaagtgggatgtctccttatgcttctcagggttttccatttcttcctccatatcctccacaagaagcaaacaggagtatcacttctttatctgttgctgacactgtttcttcttcaacaacaagtcat

SEQ ID NO: 34482 - DNA, 378 bp, Homo sapiens
aacaggtgaacaaactgaggcccatttaagtttaacaaattgcccagaaccactcaggtggggaagtggctgggctgggttcccacccaagcaaggctgacatcactgtttcctactgattcctatgggcagtgattctctgatcatccaaaggtgctgcaaatgctgggtggcccaaaggaggacacaggtccaccatgctggatgtgtgaccttgggtgagctgcggagtttgtctgtgtctcaactggctcctgggtagaagatgagagtggccagctatgcagccggcatgaggctcacaaaagacacagccagtgtatgtacatcaccagcagaagggccgcaccagccctttccctatttaagatccacaag

SEQ ID NO: 34483 - DNA, 414 bp, Homo sapiens
  misc_feature (1)...(414): n = A,T,C or G
ctttttgtattccaaatgtttgtgatgctgagaagtgaagttcattttatgtgatcttcatgcgtcgtaatctacttttggtagataattaagattattaaaccctcatttaaatgtgacataaaatacagctttaagcacataaatataaagcagcttccatcaggaacatggagcaggcagggactccattttacagaattactgagatttctcagttgtaaaacatgatgtcatcctgcatgcctcctggaattctccaatggggtcgccaaacaacaaatggagaaaaaaagttttacttccttgcattcttctacctttaaatagcaaagtaccactaccaccaccacctcttgcccccttccctcttttcttaaacttctggcatttcagagctcagcaggctacccn

SEQ ID NO: 34484 - DNA, 476 bp, Homo sapiens
  misc_feature (1)...(476): n = A,T,C or G
aggacggggnnnnncactganaccatgatgacgtctgacccgcttacgccagcttggcacgaggaaaaaagatggtgaaaggtacatgaatcaccatggactgcactgggcaagccattttagtgctgcaaatacgcagatacattcctctcacatatgtacagtgttttctcctctacagagtgtgtcttcactcgagctccaccagtcccctgtgtccaggtgaggcaggcattgttgttctggtttcattgacccagacctgcacttggccatatggccagcaaaggtggggctggttccttttcctcagcctatgctcattctgtagaacacaaatgcctgttgtcctctgatatttcactaaagtcttctccatctgaatcttactcttcttagtcctatgatcaaagcactttgcttcagagtttttcttttcatcatagaatgtcaaatctggatgatggcttaaaagc

SEQ ID NO: 34485 - DNA, 454 bp, Homo sapiens
  misc_feature (1)...(454): n = A,T,C or G
natagaaatgatgagcgatcgccannaccccaagctgggcacgaggcatgagaaacctccaccagtccaacttcagcttatcaggtgcccagatttatgacaacaatcccaggcgcaccggccaccggatcgtggtgccccctggtggcggctccaacatcaccagcctcggttgaacgtggatgcgcggaggagctagcctgaaggattctgggaatcatgtccatcccttttcctgtcagtgtttttgaaacccacagttttagttggtgctgatggagggagggggaagtccaaggatgctctttcccttttctgtttaggaagaagtggtactagtgtggtgtgtttgcttggaaattccttgccccacagttgtgttcatgctgaatccacctcggagcatggtgttttcattcccccttcctagtgaaccacaggttttagcattgtg

SEQ ID NO: 34486 - DNA, 405 bp, Homo sapiens
ggcatcagaaacctccaccagtccaacttcagcttatcaggtgcccagatagatgacaacaatcccaggcgcaccggccaccgcatcgtggcgccccctggtggccgctccaacatcaccagcctcggttgaacgtggatgcgcggaggagctagcctgaaggattctgggaatcatgtccatcccttttcctgtcagtgtttttgaaacccacagttttagttggtgctgatggagggagggggaagtcgaaggatgctctttcccttttctgtttaggaagaagtggtactagtgtggtgtgtttgcttggaaattccttgccccacagttgtgttcatgctgaatccacctcggagcatggtgttttcattcccccttcctagtgaaccacaggttttagca

SEQ ID NO: 34487 - DNA, 409 bp, Homo sapiens
ggcatggcttttgttcacagtaagttatatcaattaagttgcttataatgaacatatagctgaactaataagcatgaaatattttcactgatttataagaatccagaaattatcaatgagttttctttttctattatttaaaaaagtttttgcttggcaaatcttcccctctaggagattaaagtattttttgctcattaatcaatgtaagaacaccttactttacattcattgaactctgaggttatagaactgtgaacctttcaatttgttcggcttggggaatgtcatagttcattctgtgagtggaagttgcctttaaccacatgagaacaaataagggaatattaaagttttaactcaaggcagctgatatgcaatggctgggataatggccattacctaaaag

SEQ ID NO: 34488 - DNA, 409 bp, Homo sapiens
ggccaacagttgcgacctggagaaaatctggctccacaccttctattatgaactgcatgaggctcccgaggagcacccagagctgctgaccgatgcccgcttgaaacctaaggcccaccgcgtgaagatgacccagatcatgtttgagaccttcaacaccccaaccatgtacgtagctatccaggctgggctatccctgtacgcctctggccgtaccactggcatcgtgatggactccggtgacggagacacccacactgtgcccatatacgaggggtatgccctcccccatgccatcctgcgtctggacctggctggccgggacctgactgactacctcatgaagatccttaccgagcgcggctacagcttcaccaccacggtcgagcgggaaatcgtgcgtgacatt

SEQ ID NO: 34489 - DNA, 410 bp, Homo sapiens
ggctagcttatgtgctttggaactacacatgtataaccaatgactgactctgaaatatcaagcactgtggggtggctggaaagtaaaggtctaagctttgtgaaacactatacatatataatctatatttacttatattggcaattaatataacagtaaaagtcacaatacacctagaacataccaaaaaagcaagctttgtcattcctgctttaccggtatgatctcgtctaaacaaacatttcatttcagaaaatctgcatcaatctacacggaccatacacagtgcacaaactgaaaagggctttttttttttttttttaagctccaccatttttgaattttgcaaaaaggcggcaaaattttttgcaaaaaagaaaaatatacgggttttttattccaccaggccc

SEQ ID NO: 34490 - DNA, 484 bp, Homo sapiens
  misc_feature (1)...(484): n = A,T,C or G
aggaaaaccggataaactgangaccataccacaccacgcttgngacgagggcaacactgagctggactgtggagataaagcaaatcctgctcttgaggatctcaatgtctaatggaatgcatttgaatgtatgtggggctggagagttcatttatggtcttaggaaagccatttctggtcccatttagaaaactgaccagcacccagcaagctgcattctacattttagagaccccattggtatttgggaatttgattgcaccaccgcttttcctttactaaataatgttatggaaggagaatgaattttctcctctagtgattacaggacattaacatctcttcagaagctgcttttagcttaagccccaagaagtgaggtgggttgtggatcactgacatggtcaggggaggcccacacctcaattcaggaaccacctaatctctcccccaacctgatctctcattagagctggcagcaacg

SEQ ID NO: 34491 - DNA, 409 bp, Homo sapiens
  misc_feature (1)...(409): n = A,T,C or G
ggttttttacaacccaaggtcttgctgtgttgcccagtctggcctcgaactcctgggctaatgcaatcgttccaccccagcctcctgaacagctgggactacaggcacacaccatcacaccagtctatctagtttatgttttaaaaggatccgtctggctgcacttgagagtggggaagacctgtgggtgctgagagccaggctaggagataattgtaacatttcangagagaggatggttgggtgggccacagaggagtgttttgagaaaaacatctgattccaattgttttgaaggcagaagatgcttgtcgaggggatatcatgttgatgttatctcagggcatgcggtttatacttcttggtttaaaaaaagaacaatttgaggagagaaaatcatggacaactt

SEQ ID NO: 34492 - DNA, 481 bp, Homo sapiens
  misc_feature (1)...(481): n = A,T,C or G
agggcgggnnnnnnnnnaattgaaaccctgatgaacattattncgccgagctcggcacgaggcaccgcgcgggaggagccgccgcagcctcgcagaacccgagtggaggaggtgacagctccattgccgggtttttattttttttctctccgcctccccgtctcctcctcaggctcggaccatggtgcagtcccactggctcccctgcccccctctcctgtgagactggctgcggggagggatcatggatacttgtctgccggcttctggttcccacgcaagtaagcctgctgtcaatggaggaggacattgatacccgcaaaatcaacaacagtttcctgcgcgaccacagctatgcgaccgaagctgacattatctctacggtagaattcaaccacacgggagaattactagcgacaggggacaaggggggtcggggtgtaatatttcaacgagagcacgagagtaaaaatcaggttcc

SEQ ID NO: 34493 - DNA, 479 bp, Homo sapiens
  misc_feature (1)...(479): n = A,T,C or G
aattgaaaactgatgaccntacgacacancgctnggcacgaggataatgctacggggcatatcctcttacctaaatctttggatacatttgtaattatttctttaggataatttcttagaagaagacttgtgtggcagtaggtgtgaatattttaagatttttgttattggtttctagacagagtctcgctcttttgcccaagagggaatgcaggggggctattatggctcactacagcctcagcctcctgggctcaagagatcctctcacctcagccgcattcaagtagctgggactacaggcacacaccaccacacctggctgatttttgtatttttgtagagatggggtgtccaggttggtcttgtactcctgagctcaagcactccctccactttggcctcccaaagtgctaggattacagacatgagccaatgcatctggatatatttcaaggcttagaagatacacatctctt

SEQ ID NO: 34494 - DNA, 401 bp, Homo sapiens
ggaatacctgtagttagattaaccactttgcttgcttgattgggttctctactattttaacttaaagaagcagaggttgagaagagattttaggacctgttactaccccaagctgtgtaatatacttgaataacagaaataccttctatacaaacctttttttctacttttagatagaaaaggctactttttcagcagttctgtgaattaaagagcaaagagactgcgggtctggaatggctggggtccttgggaatgtactatcaggattttacagcaatgctggtaaatgacagggaaaatgacaggaatgaatctcaccagattttttatgtactcagcaaaaccttgagttacggtgtttattttccaatcaagtgaagagatctcctacttctccg

SEQ ID NO: 34495 - DNA, 493 bp, Homo sapiens
  misc_feature (1)...(493): n = A,T,C or G
ganccgggtttaattganaccgctatgaccattatacgcctagcttggcacgaggaaaattgcaagttggggtcagtgatactaagacttctaatttgtttaagacttcacactggattaaatgcttagggagaagtgaagaccgggaaataggagagaccagatttttttttttttaaactaaaagctctgattcctcttaccagccacttttaagcagatccgctcaaccttgatccttttttagatctggcgccacaatctgcccccaatccaccccgaaggactcaactccgaattaacagcggacccggcataaacagaccccacactttcacgacgtgagatgactaacagggactttatctaccaaaagggctagccttgattcaggctactcctctgtttggaaggcaaaatacatcggcagagaagtgaagggagaaattaaccccagcgggaacacagaatgtgacacttaccttttctgatt

SEQ ID NO: 34496 - DNA, 493 bp, Homo sapiens
tgcccgtgtttaattgaaagcgtatgaccattttgtacactatgcttggcacgaggaaacattttatcatttattaatcctccctgcctgtgtctattattatatacatatctctacgctgcaaattttgggtctcaatttttactgtgcctttgtttttactagagtctgctgttgcaaaaagaagaaaacattctctgcctgagttttaatttttgtccaaagttaattttaatctatacaattaaaaccttttgcctatcactctggacttttggattgttttttacattcagtgttataatatttgattatgctgattggttttggtgggtactgatgtgaattaataaaaacatttcatttccatgtttattttctaatctcttccacattgtaggctatgtttaccatacgtagcagaatgtatttacatttcttggttctagccatttgtattcttcctgagtgtgtgtgtgtgtgtgtctgtgtg

SEQ ID NO: 34497 - DNA, 471 bp, Homo sapiens
  misc_feature (1)...(471): n = A,T,C or G
aggagcgaggggccgcaactgaganngctagnntantcttgcaccaagcttggcacgaggaatgtaggcattgaagaaagttgtcttactgaccatccggaaccaggctaaggatcccctagaaatcatagacctctgaaattatatgcagaattctttatgtgttttcataattaataatagtctaacatattaaattcttaactgtgtgagaggttctgcatgcattatctcatttattctcctcgataaccctgtggaggtaagtattgctattatctctatggtatgtctgtagactttgagattcagacatctgataatggcagaaccagagcctgagtccaagtctggctccacaccccagcctcttaacactgtgccaattgctttgacactttgctggggagagatgaaatgatctcaaaggcactcatgatacagaaaaggctatgagccatggatccaaac

SEQ ID NO: 34498 - DNA, 425 bp, Homo sapiens
ggttccagagaccatggcaagaacccacttggtctggagggtttgggggggctctctgcgggggtgggaagggatgggggacaggggacacttaacccaaggcatgaaggataacttcgagttaccacagtgaagatggatgtagtgggaaataacaccccaagctgggagcatgttatgctaggatcaggggctttggggcttcattatttatttttacagacaaagtcttgcttgagtgcactggaataaccctagctccctgtaacctcgaactcctgggctcaagcatactcctgtcccaagcctcctgattagctgggactatgggcgcacaccaccacacctgactaatttttgtattttttttgatcgggggtccttttttttttgagacagagtctctgccacccacgcatgagagc

SEQ ID NO: 34499 - DNA, 479 bp, Homo sapiens
  misc_feature (1)...(479): n = A,T,C or G
agttccgaagggccaccccccaggganngcccatttggncnnagcaccanccnnnnnncgaggaaggtacgacgttcagatctcgtggtccataggggcagagatgtcttagtgaaggttgcctgagagaaaggagagttcccgtataaaaggcctaaaattgatttggggctcagccatcaaggggctggtgttgctcctgtcccaaacaaggaagacactctttacatcagccatattatgggaacggctggcagctccccaaaagcctactggatcctacagccatacaggaaaacagacggacacagccctttccttaaagagccctggggtcctgtcctgcaggatgctgcataggaatgggcacagatgtcctggatgggaacatggtcctggaggtgccctacctgcatcctgctgcacccccacccacgacactcgagtgcaagatcggctcactcctaaccctgacttta

SEQ ID NO: 34500 - DNA, 430 bp, Homo sapiens
ggtgtccttggcaggacagagtgggatttcatcaccatactcagaatgttgtataattggaaacttatgaattatttatttttggaattttctatttaatatttttggactgctgctaagtaacagaaactgcaggaaattaaaccctggataaggggacactactttaatttctttatacttttcaatgaaaacattgacactggaggctggaagataatagagcaaagccttcaaaatgagaggaaatttatccctagctaaacttacaaatgtgaggatagaagaaaaatgtgtcccacaccacgcaccctttcttagatattggtggataaaagaaaaaaaagaaaagggagacttaaaagacttaaaattcagtgaggatagaggtagagggttgttcctaaataccagtggtacagcaggccta

SEQ ID NO: 34501 - DNA, 473 bp, Homo sapiens
  misc_feature (1)...(473): n = A,T,C or G
aggacgggnnnnnnccatgatacactgtgnactgantacccagcttggcacgaggcaccttgttggccaggctggtatcgaactcctgacctcaggtgatccacctgcctcggcctcccaaagtgttgagattacaggcgtgagccaccacgcccagccaaaagaaaatattaactactaactttgaagactcctagacatctattcccatttctatccccttttccttcagacataacaattatcctgagatttatgttgataattctcttgcttttctttatagtttcagctacttactccaaaactatgttgtttatggatggttttgagttttatataactatttcatatatcattctgtgactcgcttttttgtcaacattatgttcctgagattaagtagtgtagctataatccattcatttttatggtacagtattccattgcttgactatattacagtttttaaa

SEQ ID NO: 34502 - DNA, 415 bp, Homo sapiens
ggagacccgagagcatgcccttctggcttacacactgggtgtgaaacaactaattgtcggtgttaacaaaatggattccactgagccaccctacagccagaagagatatgaggaaattgttaaggaagtcagcacttacattaagaaaattggctacaaccccgacacagtagcatttgtgccaatttctggttggaatggtgacaacatgctggagccaagtgctaacatgccttggttcaagggatggaaagtcacccgtaaggatggcaatgccagtggaaccacgctgcttgaggctctggactgcatcctaccaccaactcgttcaactgacaagcccttgcgcctgcctctccaggatgtctacaaaattggtggtattggtactgttcctgttggccgagtggagact

SEQ ID NO: 34503 - DNA, 435 bp, Homo sapiens
  misc_feature (1)...(435): n = A,T,C or G
ggcctcgtgccatggcaagcatgtgccccgggcagtgtttgttgacttggaacccacagtcattgatgaanttcgcactggcacctaccgccagctcttccaccctgagcaacttatcacaggcaaagaagatgctgccaataactatgcccgagggcactacaccattggcaaggagatcattgacctcgtgttggaccgaattcgcaagctggccgaccagtgcacgggtctccagggcttcttggttttccacagctttggtgggggaactggttctgggttcacctcgctgctcatggaacgtctctcagttgattatggcaagaagtccaagctggagttctctatttacccggcgccccagggttccacagctgtagntgagccctacaactccatcctcaccacccacaccaccctggagcactctga

SEQ ID NO: 34504 - DNA, 412 bp, Homo sapiens
cctacacctcaggaaagccggagaattggggcacgaagcggggctttgatgacccgcaaagggcgaggcatgcaggaggtggaggaattaagtgaaacagggaaggttgttaaacagcaccgtgtgggcgaggccttaagggtcgtggtccttgtctgggcggggtctttgggcgtcgacgaggcctggttctgggtaggcggggctactacggggcggtgcctgctgtggaaatgcctgcccgcgcgcttctgcccaggcgcatggggcatcgtactctagcctccactcctgccctgtgggcctccatcccgtgccctcgctctgagctgcgcctggacctggttctgccttctggacaatctttccggtggagggagcaaagtcctgcacactggagtgggtactagcg

SEQ ID NO: 34505 - DNA, 469 bp, Homo sapiens
  misc_feature (1)...(469): n = A,T,C or G
cgcganaaattgatagctgtcgacctgactacgccaagcttggcacgaggctttccatggtgtagtcaatgccaagtgatgcatctaggcaggaaaatctactctttgcttttttgggggcaattagtacatttgtgaagtgcagcatccaagaaacagcctgttttttcatcccttgagaaaggagcagtcattgcagcttttctgtccttgtcggcctgcagttcctggggaaaagagtacatctgagctacttgtccaagcctctgtctgcaggtgacaggttttgggggaaatgagatgcattaagtagaacatcatctcgggtcagacattgccccttttgtttgccaatgccccagtcctagagacttgtcctgacagtgccgcacacctacttttgatctctcagagcaggtggctccatccccagactagcctggctgctctccgaggcccctccacctgg

SEQ ID NO: 34506 - DNA, 468 bp, Homo sapiens
  misc_feature (1)...(468): n = A,T,C or G
cgcggggaacggactgcatccgtacgaccngacnnacgccagcttggcacgaggccgcggacgccaatcttgtgcatggagtcgccattttgcttttatataggccgccagaagacccggcgctttcttccttctgcagctgaagctgcggcggggccggggctggggtcggggccaggaggaattttgttgtcagagaataaaaggaggttgtccataattgactttaagcagcaatcagtaaaacattgagctcttcagctccgcctttcttgctctgaaaattggaaaaccaacaaggttttgatgttttgtgtgacgccacctgaattataaaccacgatgaacataaccaaaggcggtctggtggtgttttcagcaaactcgaattcatcatgtatggagctatccaagaaaattgcacaccggctatgggtggatatgggctatcccaggtcctccacgaac

SEQ ID NO: 34507 - DNA, 419 bp, Homo sapiens
ggttcatgatggcctcatgttactaatgaggaaactggggcccacagtcagacatgagccactggtgggacagaaataggctcctggttctgtgtgatccaaagttggtgcttttctgtctatccctagctgttggtcaccaccagctttctgcatattttctcacggtgcctctcatttcccagagccgcctggagcccaaggctgtacacgtgccctgtgctgattctctgcctaggaaaggaccatgcagctagagatcaaagtggccctgaacttcatcatctcctacttgtacaacaagctgccccggcgccgggcagacctgtttggggaggagctagagcggcttttgaaaaagaaatatgaaggccactggtaccctgagaagccactgaaaggctctggcttccgctgtg

SEQ ID NO: 34508 - DNA, 438 bp, Homo sapiens
  misc_feature (1)...(438): n = A,T,C or G
ntttaatcgagnacatcgtaaaccacgantacgccaagcttggcacgaggtgaataatgtcccttttaaccatggtcttcactgggagttcatgttgcttcaagtccctagcacccagtgatacccccacaggtaagccctcagcatcctgaatacatcatccgcagcctgggaaccttctccctcgtacagcacaggaacctgacacatagtaggcacacagtaaacatttgtgaatgaatgggagtcatccagtcctgactcttctgtctcttgagggcccttgaatcttccgcttcctccccaccgatttcagcgtgtccacatcacagctccctccagttcatgttgcttcaagtccctagcacccagacccagaagggcctttactcatatcttattccttacgcagcctttctggagtagtcagctgctccc

SEQ ID NO: 34509 - DNA, 433 bp, Homo sapiens
  misc_feature (1)...(433): n = A,T,C or G
gggttttaaatacacggattcacttcctaacccagtttctcagaagattaatgaatagtcatcctgttgacccatctgcttctcttcttcacatcgttttgtgcggatgaggcacacacagacacagagttctcacttgcagcagtccggcacatacagcctcacacgcgccacaccagggggtgtccccaggagaggtagaacaggtgccagatgttgcagcagtacactcctccctgatcctccttctcatcccccaccccttttctgaatctcctgcacagtcactgaagtcccatttttatatgcaagaagagaagagaaagagccctaggatgcaaggatgccttgtcacctctcatcttctgtgctgggatagacacctgatctttttggaagtgaaatccagagtctggggcaaagaccaaaggan

SEQ ID NO: 34510 - DNA, 418 bp, Homo sapiens
ggctgaacctgacccaggaggagacagggctcagctcagacatcctgagctattatctcctctgcaaccgggccggctccaaccccttccaacagaggctgactctgtcccagcgagctctggccaacatccactcccagctgctgggcctggagcgagaagctgtgcctcagttcccttcagcgcaaaagcctctgctgtccttggaggagactctgaatgtgacagaaggaaatttccaccagttggtggcactgctacactgccgcagcctgcacaaggtggtaactcatcgatgcctcataacaatgctatgaagaaggaactatgattatcccacctaacaggttagaagatgaggagcagagttgagggacctttccaaggtcacacggccagccagcccgtgcacactgag

SEQ ID NO: 34511 - DNA, 453 bp, Homo sapiens
  misc_feature (1)...(453): n = A,T,C or G
ggaccatgcccacaggaacactgggtaacctccgaggctatggcatgtcatttccaggcctcgcagaccccagcctcacacccccacaactggccactccaaatttgcaacagttctttccccaggccactcgccagaccttgctgggacctcctcctgttggggtccccatgaacccttcccaggtcaacctttcaggacggaacccccagaaacaggcccggacctccttctctaccacccccaatcgaaaggattcttcttctcagacaatgcctgcggaagacaagtcataccccccacaggggtctgaggaagccgcagagccccggatggacacaccagaagaccaagatttaccgccctgcccaaaggacatcgccaaggaaaaacgcactccagcacctgagcctgagccttgtgaggcgtccgaactgccaacaaagagattgn

SEQ ID NO: 34512 - DNA, 421 bp, Homo sapiens
ggctctgttgagaatcatgctttggaggcagctcatctattggcaactgctggctttgtttttcctccctttttgcctgtggcaagatgaatacatggaggtgagcggaagaactaataaagtggtggcaagaatagtgcaaagccaccagcagactggccgtagcggctccaggagggagaaagtgagagagcggagccatcctaaaactgggactgtggataataacacttctacagacctaaaatccctgagaccagatgagctaccgcaccccgaggtagatgacctagcccagatcaccacattctggggccagtctccacaaaccggaggactacccccagactgcagtaagtgttgtcatggagactacagctttcgaggctaccaaggcccccctgggccaccgggccctcct

SEQ ID NO: 34513 - DNA, 503 bp, Homo sapiens
agcgcccctttgaatcgattgcacttgacacgccaagcttggcacgaggggatgctgcctcagacaaaggcagtgagccttccctgccaaagtgcccattccatgggctcggcctcactggtcactgttagcccatgaacacgtgtgggcctcggtcacgtggctttgagggcagtctgaccaggctagaccacacgtgccgtgacagggggtgccattcccctcgcaggctctaatgtgcccacatgtagcctggcagtccaaagaccaagaatcaacttgcaaatctgccattaaactggtgtgcgacttcaggcatatcactgccttctctgggcttcagtggccttttcatacctagaagtctgcggtctgaggctctttgggttcatacacactgttctaagcttctgtaggggaccttgtgatctgccgtgcccctcctcccttgttttttctggcctccccaccccaccctcagaagctgcttgctctgccccaag

SEQ ID NO: 34514 - DNA, 432 bp, Homo sapiens
  misc_feature (1)...(432): n = A,T,C or G
ggcacacgacttgactgggaaaacagaaaagggggtctctgttaacatctagtctaaaggataaaactgcctggggggcaggggtaggaatctcttcactaccctgattcttgattcctggctctaccctgtctgtaccttttctttgaccagatctttctcttccctgaacgttttcttctttccctggacaggcagcctcctttgtgtgaattcaaaggcagggatgacttgctgcccaggcagcttcctcctgcacacagaaagctcaagggcactgaaccactgcttctcttttgaaagagaagctagctgccactttgacgtgggcttcgaagagtatccacctacacccctgtgctcccctgccacactgatggctcaagacaaggctggcgaaccctcccagaagcatatctggcccagaaagcn

SEQ ID NO: 34515 - DNA, 443 bp, Homo sapiens
  misc_feature (1)...(443): n = A,T,C or G
ggagcgttcagggcctgatnatcctgatgaacatctgtaaccacgactacgccaagcttggcacgagggggcacgagggacaggccttaccaagattagcggtgtcaattaaggccaaacgggtgccctctggtgcagtgcctggcccgcagtaagcgtgctctccaacaagctccctccagccctggtggtgagcatgacagcagcatgctctgaacctcatggagagtcccagcacgccttctccccatcccaaattatttctaacacaggtacgccagtgaggtgtgtgtttgctgcctgggtgacatgagctaccatcgtgtacaagtctttgtttggtccttatgggaacaatgcattctgtggccataatagggaatggaaagggcaaggtcattaaaggaaaatcaacatcccatgtgctagcccactctacaacn

SEQ ID NO: 34516 - DNA, 439 bp, Homo sapiens
  misc_feature (1)...(439): n = A,T,C or G
ggagggtccagggactgatnatcatgatgacatgattacgcccagcttggcacgaggtgcttggcaagacacaacacttacctccaggaatgtacaggccagcgggagcccacgtatcagctcaacatccacgacatcaaactgctcttcctgcgcttcgccatggagcagtcgttcagcgcaaacactggcgggggcggccgggagagcaacatccacctgatcccgtacatcattcacactgtgctttacgtcctgaacacaacccgagcaacttcccgagaagagaagaacctccaaggctttctggaacagcccaaggagaagtgggtggagagtgcctttgaagtggacgggccctactatttcacagtcttggcccttcacatcctgccccctgagcagtggagagccacacgtgtggaaatcttgcggaggc

SEQ ID NO: 34517 - DNA, 508 bp, Homo sapiens
  misc_feature (1)...(508): n = A,T,C or G
cgcgccccattgaattgataaacctctgaccanngacacgccaagcttggcacgaggctttctctcgctgccgctgggaccccgtgtcatcgcccaggcctagcacgatgccccctaaaaagggaggtgatggaattaaaccacccccaatcattggaagatttggaacctcactgaaaattggtattgttggattgccaaatgttgggaaatctactttcttcaatgtgttaaccaatagtcaggcttcagcagaaaacttcccgttctgcactattgatcctaatgagagcagagtacctgtgccagatgaaaggtttgactttctttgtcaataccacaaaccagcaagcaaaattcctgcctttctaaatgtggnggatattgctggccttgtgaaaggagctcacaatgggcagggcctggggaatgcttttttatctcatattagtgcctgtgatggcatctttcatctaacacgtgcttttgaagatgatgatatcacgcn

SEQ ID NO: 34518 - DNA, 494 bp, Homo sapiens
  misc_feature (1)...(494): n = A,T,C or G
taatgtcggtgctgcgantantgannaccgtcgtgaccancannacgccaagcttggcacgaggggagagtccaccttgcagcactttctgtttatctcaaaaaaatttttaggcagcctttctaacgacatgataaattgagaatactatgcacgttcttttaaaaataattgctattcttatacaaattgctggttgggggtgggggatatattcttttcatatattttcatagggttcaaatggaagtggtaaggaaatctgaatagctaatgaaatagctgcgctttgtaaaaagaaatgtaaaagctattaaaatgttacattaaaatccacttgagatgcctaaaatgtactcagcagctctttgcatgttgtaattttcatatcaaaatgctttatttacattggaagagaaatttccattacaaaacaaaaactgacatgaacgattatttcaaaatagtcttttgtagctaatttttaaaaattg

SEQ ID NO: 34519 - DNA, 436 bp, Homo sapiens
ggcctgggtgaatgagaccatccctcaaaaaaaagctagaaagaggaaaaagaaaacagaaatgtctcagtctcgactgggctgatggctcatgcctgtaatcctagcactttgggaggctgaggcaggcggatcacttgagcccaggagttcaagaccagcaaggccaatgtgggaaacccagtctccaaagaaattcaaagattaatcgggcatggtggcccatgcctgtggtcccacctactcgggagcctgaggtgagaggatggcttgaacacatgaggcggaggttgcagtgagctgaaatcacaccactgcactccagcctgggcgacagagccagactctgtctcacaaaaaaaaaaaaaggttaaattcctttttgcccctcaggaaaaaaggaccaaaatttctatttttttgttaaaagaacaaa

SEQ ID NO: 34520 - DNA, 469 bp, Homo sapiens
  misc_feature (1)...(469): n = A,T,C or G
gggcgccncnnncccgataactaaggcaattgcanacgnccatcttggtacgaggccggaccctggcagggctgtcaggtacagccacaaagcaagctgtttctgactgtgttcccacactttctcaggcatccaccctggtgtatgaatttgcttcttctttataacaaactacctctaaactgcactctagtctacagatcagctgggcaatgctgttgatctcggctgggcttgctcgtgtgtctttggtcagctagcaggttatctggggcctgattggtctaggatggcttcacttgcacatctggcacttagatgtgtgttagctggagcaatagggggcctggaccccgtgggtctccttttccagcaggccacttgggcttgttcacagggcagatgggcccagttcaaagggtctgagaacacaacggtactgcaggatgagctttggaactgctgcacn

SEQ ID NO: 34521 - DNA, 425 bp, Homo sapiens
gggtaacctgaaaccatgtacttttgtaaatgaatggaccttcttttccctaccctcccatgtcctgtcagaggtacagagcctttcccaagactgctgatatggtttgaatattttgttgcctccagattttacattgaaatgtgatcccccataggagaggtgggacctggtggaaggtgtttgggtcacaggaccagagccctcatgaatggcttggctcctccccattgtaatgagttacgctgagaactgtttgtttaaagagcctggcacctccccaccccactttctctcaccatgtgacatgtctggtcccacttcactttccaccatgactggaaacttcctgaggtcctcacaagaaacagatgttggcaccatgcatcttgtatagtctgcagaaccatgaaccagagaaaccc

SEQ ID NO: 34522 - DNA, 426 bp, Homo sapiens
ggcccaggcagcatgcaggagggtctgtggggctcacctcctcaccttacccaccatcactcgcgcctagctctcacctctcagttgaatgaatagtgggagatcatttgacttttaatttatgagaattattttatgttatttatgtatataattaactgttttatacatagtagtctcatcaaatgaattcgggcttggggtgatattgtctccattctccagatacaagtgctccaggcatccatggaatcagcaggagaccagggctcctaagatatatttttaaaaatcagtatcgatttctttttgcctttgcagaatctaaagggcaaatgacctcgcagagactcccaacgggctttgggctcatgacgaaacacccactagcattgatcttttattcctcttccctataaaataaag

SEQ ID NO: 34523 - DNA, 418 bp, Homo sapiens
ggctgaaaacctaaacagacacctcaccaaagaaggcataaaaatggcaaacatatgaaaagatgcttcatatcatgtgttatcagggaaatctactacagtagattttggaccattctaataggccaagttccagcacactgaaaacaccaaatgctggcaaggacgtggaacaaaagcaatttttatgtgttgctggtgagaatgcaaaattgtcaactacttgggaaggtagttgggcagtttcttacaaaattaaacttactttgaccgtatgatcctgaaatcttactccttggtatctatcaaaaagagttaaaaacttgtatccacacagtagcctgcacataaatgtttatagaagctttattcgtaattgccaaaacttgaaaacaaccaagatattcttcagtaggtg

SEQ ID NO: 34524 - DNA, 470 bp, Homo sapiens
  misc_feature (1)...(470): n = A,T,C or G
aggacggggnnnngcaactgatactgtcgacctgcttacgccaagcttggcacgagggccgttcttctgaaatgagatctcaaagcagtatagttcaaaacaaaaggttttaacaaaaaattggcatatgcacaatttctccaccaatttttgtgtgtcaaccatttagttaacttttccacttgaaaaaatgcaatagaaaaccggacaccatgtttcactatctcagttaatattcacaattacagaggctacaactcaggatacagcatcaccaatgctgcccagagtcagtttatactgaaattaagttctttacaccaagtaaatggttgtccacaaccactggctagtgtacatatgaactaaaatttctagatttggggagaaacaaatgctgctccgatcatctgctctgcttcttctgttcctcaattcatgcttagaaacctttcatgttactcttggtt

SEQ ID NO: 34525 - DNA, 419 bp, Homo sapiens
ggtaaaaacctccattattggaaaattctgtattgctcgctggggaaaggcctttacagacccagtaggagagttaacttgcctaggacaacaatattacaacgagacactaggaaagactttatggaggggcaaaagcaataattctgaatcaccacacccaagcccattctctcgtttcccatctttaaaccattcttggtaccaacttgaagctccaaatacctggcaggcaccctctggcctctactggatctgtgggccacaagcatatcgacaactgccagctaaatggtcaggggcctgtgtactggggacaattaggccgtccttcttcctaatgcccctaaaacagggagaagccttaggataccccatctatgatgaaactaaaaggaaaagcaaaagaggcataacta

SEQ ID NO: 34526 - DNA, 428 bp, Homo sapiens
gggcccatctctagcagaaaccttgggctctctggcatgaacttcagggccaccatggacacggtgcagggcagagcacagacgatgacaaacactctccagctatggaagtggtaattggtccccatgctgaagccccagccatagtgtgggatgatgctccaggccatggcagatgcgtacaggcccccagtcatccagaagatgcccagccaactgaggggttctcctcgcttctcccgagacaagaattcagaaaaataggcaaaaacaatcggtagagcacccccaataccgatgcctgagatgagtcggcagaagaggaaggctccatatccctgcacgaaggaagagagggaggcgaaggaggcattgacggccagagacatgctgaggactcgcttccttcccagcttatcagccaggcc

SEQ ID NO: 34527 - DNA, 420 bp, Homo sapiens
ggccacagccgaaattgacctcaaagaagatataggtaaagccttggaaaaggctgggggaaaagagttcttggaaacggtaaaggagcttcgcaaatcccaaggccctttggaagtcgccgaagccgccgtcagccaatccagtggactcgcagccaaatttgtcatccactgtcacatccctcagtggggctccgacaaatgtgaagaacagcttgaagagaccatcaaaaactgcctgtcagcggcggaggacaagaagctaaagtccgtcgcgttcccgcctttccccagcggcagaaactgctttcccaaacagactgcggcccaggtgaccctcaaagccatctcagcccactttgatgactcgagcgcgtcctcgctgaagaacgtgtacttcctgctcttcgacagcgagag

SEQ ID NO: 34528 - DNA, 386 bp, Homo sapiens
ggcctcgtgccaagcttggcacgagggtggtttttcggatcatgtctggtggctccgcggattataacagagaacatggcggcccagagggaatggaccccgatggtgtcatcgagagcaactggaatgagattgttgataactttgatgatatgaatttaaaggagtctctccttcgtggcatctatgcttacggttttgagaagccttccgctattcagcaaagagctattattccctgtattaaagggtatgatgtgattgctcaagctcagtcaggtactggcaagacagccacatttgctatttccatcctgcaacagttggagattgagttcaaggagacccaagcactagtattggcccccaccagagaactggctcaa

SEQ ID NO: 34529 - DNA, 426 bp, Homo sapiens
ggctgttccacaccattgaaaccctcatgaggattaatgctcattccagaggcaatgctccagaaggattgccccagctgatggaagtagtgcgatccaactatgaagcaatgattgatcgtgctcatggaggcccaaactttatgatgcattctgggatctctcaagcctcagagtatgatgaccctccaggcctgagggagaaggcagagtatcttctgagggaatgggtgaatctctaccattcagcagcagctggccgcgacagtaccaaagctttctctgcatttgttggacagatgcaccagcaaggaatactgaagaccgatgatctcataacaaggttctttcgtctgtgtactgaaatgtgtgttgaaatcagttaccgtgctcaggctgagcagcagcacaatcctgctgccaatc

SEQ ID NO: 34530 - DNA, 418 bp, Homo sapiens
ggccaaggatcatggcgcaagggactacattggaccctctggcctctgggcctttccctgcctccggggctagagaaaaactgaacagtggagcggggagggggcatcaccctacctggctgggcatgttccatgctgctttgaccttaacccctgacctgagttcatcagtccagcggggagttctgtctctcttcccattacttacccaggggctgatgcggagctgggagggagaggccactgcccttggctgagaggcccagtaaccatgcctgcctccctaggctcatctttggcaccctgtacccagcctattcttcctacaaggccgtgaagacaaaaaacgtgaaggaatatgtgagtggatgacccttcaccccctacccaacccacatggcacagagaggggagggct

SEQ ID NO: 34531 - DNA, 478 bp, Homo sapiens
  misc_feature (1)...(478): n = A,T,C or G
tgaggtcntggggattgaaacctgatgacctcattacgccaagcttggcacgaggcctcgtgccaagcttggcacgatgctactattgaaaatgagagatacaggaatgtctcaaattccaactttggaaaccacgttgaaagaaggtgctctcatctggacatgatggttcacgcctgtaatcccagcactttgggaggccgaggctggcagatcacgaggtcaagagattgagaccatcctggctaacatggggaaaccttggctctactaaaaatacaaaaattagccaggtgtggtggcacgtgcctgtatacccagctacttgggagtctgaggcacgagccaccatcctggctaacatggagaaacctcgtctatactacaaattcgaaacttaccccggcgtggtggcacatgcctgttgtgccatctacttgttgaggtgacgcatgagaattgcttgaatccccgatgc

SEQ ID NO: 34532 - DNA, 427 bp, Homo sapiens
gggttttttttcttttgtggttcttccctggagcgactctttggagtcctggatatcccgcctgccccttcccctcagccccatgcttgttccaacagtctccacagcaaaatgtgatgctttgatttttttgttgctggttttgtttttgtattgattttgtgcttttgttttgaattttttcctttcctactaaaattatgcccaaaaaaaagttttgcatgtttcctgctgtttcttcacaccttcgtatatatcaccttcacctctctgttttctatagtttgtgcaaaaactgatcgatttaaaagggcttcaaagaagctgctttaaattgttagacggttgattatttttttcaagattgtattgtttaattttgaagtggcaactttctcctctattgcccttatagcgtttgcctgtg

SEQ ID NO: 34533 - DNA, 419 bp, Homo sapiens
gggtctaaagaagaagaagcaggaaggataaaagattgctgggacaaccaggaagcacctgctctctccacgtgtagtaatgccaatatctttcgaaggataaatgccatattggataattctctggatttcagtagagtctgcactacacctataaaccgaggaattcatgatcatttgccaggtttaagggaagaagctgtctccgtaacataaatgtgcaagatgaagcagcaagtgctgatggagaagctgcagcaagttacccagaagatctagctaagatcattgacttccaggactctgaagaaacagttacaagcaggatgcttttcccaacctctgcgcaagaatcttcccgtggcctcccagatgcaaatgacttgtgccttggcctgcagtccctcagtctgacaggg

SEQ ID NO: 34534 - DNA, 466 bp, Homo sapiens
  misc_feature (1)...(466): n = A,T,C or G
tctgagnnccttagtatntaactctgagaccancantacgcctagcttggcacgaggctataacagtgaaagtgatgaatggacagaatgtttgccaattctcaatgccaggtattaccactgtgcagtcaccttgggtggctgtggctatgctttaggtggttacagaaaaggggctccagcagaagaggctgagttctatgatcctttaaaagagaaatggattcctattgcaaacatgattaaaggtgtgggaaatgctactgcctgtgtcttacatgatgttatctacgtcattggtggccactgtggctacagaggaagctgctcctatgacaaagttcagagctacaattccgatatcatcgaatggagcctcatcaccttcagtccacatccagaatatggattgtgctcagttccgtttgaaaataagctctatctagtcggtggacaaactacaatt

SEQ ID NO: 34535 - DNA, 451 bp, Homo sapiens
  misc_feature (1)...(451): n = A,T,C or G
natagaagacagtgnnnaccnattgataaccatctaagaccaccgagacgccaagcttggcacgaggggacggtgtagacgatgaaccgactttctaatactttgtaaataaatcggattccttgtgtcctttgtgctagggtaacccgggactggaatgtaaagtgaagttcggagctctgagcacgggctctttccgccgggtcctccctccccagaccccagagggagaggaccaccccgcccaggcccgccccaacccctgctcaggtctgagtatggctgggagtcgggggccacaggcctctagctgtgctgctcaagagactggatcagggtagctacaagtggccgggccttgcctttgggattctacctgttcctaacttggcgaggggagcggggtccctggccccttttccacactcctcctccgacagcagctccctgg

SEQ ID NO: 34536 - DNA, 475 bp, Homo sapiens
  misc_feature (1)...(475): n = A,T,C or G
atcgaaaccnttgaatgaaaacgctcagcnnggcacgagggtcccttagtatacatggggggatgggcccaggacctgctatccgaggatgctcaagactttgatttgaaatggcttatagaatttgcaaataaccattgcacatccttctatatactttaaatcatctgtagattacttataatacctcatacattgttacataaacccttggtgcgccgtacagtaaataaagtgtgtacatattccgtacagacacaactttttttccacatattttagatttgggtgggtgaatccactgatgtggaactcacagatatggagagcccactgtatacaataaaaatatttgacatagtttgaaccatggaaagggatattaatccctcatagcttctaccctccaagagctaaaactttttttgagaaaataatacttaggggaaatggagactgtgagaccacatcactg

SEQ ID NO: 34537 - DNA, 436 bp, Homo sapiens
  misc_feature (1)...(436): n = A,T,C or G
natggnnactgtcatgatcgacanccctccaagcttggcacgagggagagagtggtaatatatcaaaatttaaaaaaattttaatgagttataaatcttaatatagccatcttagccataaccacaaataaactcattttttctgttaaaatacttgacagagtccttgcaattgaatgtctttgttcaacaaaaactgtattaagtgttttaaatttaaaatctaatcttatgcaaatagctggtggtcaaaacctttttccatcaaaagaagatctttggtttgacttcatattctgggatgtttgtaggtacctggaatggaaacacaaaagtagccataaagactcttaaaccaggcacaatgtcccccgaatcattccttgaggaagcgcagatcatgaagaagctgaagcacgacaagctggtccagctt

SEQ ID NO: 34538 - DNA, 431 bp, Homo sapiens
  misc_feature (1)...(431): n = A,T,C or G
natgaggactgtttgatcgcganncacgccagcttggcacgagggctgcatcccctttttggaattgctcaaccaggtggtaaccggcgccgcttcctggccttgggaggtggttcctttcttaacccacaagaacctctcccaagagaacttggtcctgatgtctgaccatggagatgtgagcctcccgcccgaagaccgggtgagggctctctcccagctgggtagtgcggtagaggtgaatgaagacattccaccccgtcggtacttccgctctggagttgagattatccgaatggcatccatttactctgaggaaggcaacattgaacatgccttcatcctctataacaagtatatcacgctctttattgagaaactaccaaaacatcgagattacaaatctgctgtcattcctgaaaagaaagaca

SEQ ID NO: 34539 - DNA, 403 bp, Homo sapiens
ggctaattattaaatggtgtcggaattgctgcattttccttaggaatttagtggaacttatcttcattaaagttatctgggaccaggttgatatgacttgtcaatattatggtcaactttaagtcttacctttcccttgggcctttgattaataagtataactcttatacaataaatactgctttcctctaaaaagatcgtgcttaaattaacttgtaaaaaatctgctggaatggttgttgctttccactgagaaagctaagccctacatttctattcagagtactgcctttagatgtgaaatataagcctgcggccttaactttgtattaaaaaaaatgctcttgtttaaaaaaaactgttcccataggtgcagcaaaccaccatggcacatgtataccta

SEQ ID NO: 34540 - DNA, 377 bp, Homo sapiens
  misc_feature (1)...(377): n = A,T,C or G
ggccaccctcaacaggatgtggtgggggtgaaacttgaagaatttttgtttccccttctcccttcttacgtttgggaagttttatgtagtgtaacaaactctagacgagttaccagaagatgtggattctagttctgattctgtcactcattggctttgagtgacatatttttatttcctgggcctgttttctcacattaaaaaagtagaagttagatgagtgatctctaaggttgaaggtaatttcagctctcacattcttttgagtttgtggctcttgaaagccctggtcctgatgctccctgtaaaggtggctgggagagaagccagccaggctgcacttgcagaacattccctgctctgtactgggtgtgtgn

SEQ ID NO: 34541 - DNA, 426 bp, Homo sapiens
gggtgagccgatatcacgccactgcagtccagcctgggtgacaaagtgagactccatctcaaaaaaaaaaaaaaaaaaaaataactgggcctgggggccctccctttttaccccaccctcttgagaaacctgggggggaagaattttttaaccctggccaacaagggttgaagggaccttaatttgggcccttgtcctcaacccggggaaaaaaaaaaaaaccttttttttaaaaaaaaaaaaaaaccccccggggggggggctccccccttttacccccacctttttggggggttagggggggggttttttaaacccggaaaaaaaaaaccttcttgttaaaatgggaaaacccccttttttataaaaaaaaaaaaaaaaaatgggggggggggggcccccccctaaatccaaaatggcgggggg

SEQ ID NO: 34542 - DNA, 372 bp, Homo sapiens
tgtcacgcgcccccgaggaccgcccgacgtgcattcccgattccttttggtttcaaggccaatatggcaactctaaaggatcaactgatttataatcttctaaaggaagaacagaccccccacaataatattacagttgttggcgttggtgctgttggcatggcctgtgccatcagaatcttaatgaaagacttggcagatgaacttgctcttgttgatgtcatcgaacacaaattgaagggagagatgatggatctccaacatggcagccttttccttagaacaccaaagaatgtctctggcaaagactataatgtaactgcaaactccaagctggtcattatcacggctggggcacgttagcaagaggga

SEQ ID NO: 34543 - DNA, 468 bp, Homo sapiens
  misc_feature (1)...(468): n = A,T,C or G
aggggtttcatcgacactgttgatagaacacatcgccagcncggcacgaggaagagtccggttctgggacagctggagacagtggtggtgactgaaataactttatcaaaggaaagctattttgcgaactatcttctccagcggagatggccaatgtgctttgtaacagagccagactggtttcctatctcccaggattttgctctttagttaaaagggttgtcaatcccaaagccttttcgactgcaggatcatcaggttcggatgagtctcatgtggctgctgcacctccagatatatgctctcgaacagtgtggcctgatgaaactatgggaccctttggacctcaagatcagaggttccagcttcctgggaacataggttttgattgtcacctcaatgggactgcttcacagaagaaaagcctgggtcataaaactttgcctgatgttctagcagaacctntat

SEQ ID NO: 34544 - DNA, 430 bp, Homo sapiens
  misc_feature (1)...(430): n = A,T,C or G
natgatgactgttatgattgaanacgtccagcttggcacgaggctccatcccagtgtggtgcctcgcccccacgtgcagtccgtgctcctgactccccaggatgagttcttcatcctaggcagtaaggggttgtgggacagcctgtccgtcgaggaggccgtggaagccgtgcgcaacgtgcccgatgccctggctgctgccaagaagctgtgtaccctggcccagagctacggctgccacgacagcatcagcgctgtggtggtgcagctcaatgtcactgaggacagcttctgctgctgcgagctcagcgccggtggggctgtgccaccacccagtcctggcatctttcctccctcagtgaacatggtgatcaaggatcggccctcagatgggctgggcgtgccgtcctccagcagcggcatggctttt

SEQ ID NO: 34545 - DNA, 378 bp, Homo sapiens
  misc_feature (1)...(378): n = A,T,C or G
ggcaggaacgcttcaaccgctggatcctgacggacatgactgtggccggcgtggttctgctgggctcactcttcagtcggaaatgaccagacactgaccatccactctaccctcccacccccttctctgctccaccacattctccgtccagccgccattgccaccaggagaaccactacatgcggcccatgcccacctgcccataacagggttgggcccaaatctggccccttgcagctagttttctagaatatatcacacttctgtgagacccccacacctcagttcccttggcctcagaattcacaaaatttccacaaaagctgtccaaaggaggctgtccggtatggaagggattagggctgggggcaagagggn

SEQ ID NO: 34546 - DNA, 432 bp, Homo sapiens
  misc_feature (1)...(432): n = A,T,C or G
natgagnactgtgatgatcgagagacctctcagcttggcacgaggcgatcttgctggagacaagtggacaattgggggtcactggcagagacggtattgcccaaaatgttcacagcaggaggccagcaggcctgaggcaacacgggcaaccgcgaatgcctcttttggtttaaattatgccatcacaaccctctttcacccatgaggctccccatccctgacagccaggtgagcatttggagctggtttctcgacatgaggatgggttggttgttaaattaacaacctccacagtatcagattgagtgagctttgtctgctggaaaaacctgaaacgtcaactctgcttcaaggtcggcaagaagaacagaaggcggagacttggcagagagactcaagctgattgtcacaggctacagaggggccagctcc

SEQ ID NO: 34547 - DNA, 401 bp, Homo sapiens
aaaaaagaataaaaatggaaagtgggactgagagggagtcagcaggcatgctgcggtggcggtcactccctctgccactatccccagggaaggaaaggctccgccatttgggaaagtggtttctacgtcactggacaccggttctgagcattagtttgagaactcgttcccgaatgtgctttcctccctctcccctgcccacctcaagtttaataaataagggtgtacttttcttactataaaataaatgtctgtaactgctgtgcactgctgtaaacttgttagagaaaaaaataacctgcatgtgggctcctcagttattgagtttttgtgatcctatctcagtctgggggggaacattctcaagaggtgaaatacagaaagcctttttttcttgatct

SEQ ID NO: 34548 - DNA, 409 bp, Homo sapiens
gggttcaacaaaatccttataccattgcttattttaaatatataggattagtacaaaatgctttcggttaaagctcttactgagggccaactagcccgtcttagcaatctttcagttaactgtttagatacaagtttttatcctaccttctccttttttgaaggcacagctgctcttttttacttaggagggaactaccctaaatcttgatgtcataaaaaaatcctcatttgtctacttaggacaagttatgattcggtttcttgcatcctgatttttaagattaaaatgaaaaaaggcgccgggcatggtggctcatgtctgtaatcccagcactttggtaggctgaggcgggtgataacctgaggttggggaccaccctgaccaacgtggagaaatcctgtctctt

SEQ ID NO: 34549 - DNA, 377 bp, Homo sapiens
ggaaaacattgaaaatatgcttacttcagagaataaagtcattgaaccccaatacttcggcttggcatacttattcagaaaagtaatagaggagcagttggaaccagcagttgaaaagataagcatcatggcggagagattggccaatcagtttgcaatttataaacctgtcactgattttttccttcaacttgtggatgcaggcaaggtggatgatgccagagctctcctacagagatgtggtgcaattgctgaacaaaccccgattttgttggtggtcctccttaggaattctaggaaacaaggaaaggcatcaactgtgaaatctgtgttagaattgattcctgaattaaatgaaaaggaagaagcatacaatt

SEQ ID NO: 34550 - DNA, 429 bp, Homo sapiens
  misc_feature (1)...(429): n = A,T,C or G
natggtgacagtgggaatgaanacgtccagccngccacgaggccgaccaactagaagaggagaagtctgttttgcagaccgagattgccaacctgctgaaggagaaggaaaaactagagttcatcctgggggctcaccgacctgcctgcaagatccctgatgacctgggcttcccacaagagatgtctgaggcttcccttgatctgactgggggcctgccagacgttgccaccccggagtctgaggaggccttcaccctgcctctcctcaatgaccctgagcccaagccctcagtggaacctgtcaagagcatcagcagcatggagctgaagaccgagccctttgatgacttcctgttcccagcatcatccaggcccagtggctctgagacagcccgctccgtgccagacatggacctatctgggtccn

SEQ ID NO: 34551 - DNA, 501 bp, Homo sapiens
  misc_feature (1)...(501): n = A,T,C or G
tggcccttttgtaatgaaacactcgacaangaccacgccaagcttggcacgaggcactgggcatggagaatgggaacattgccaactcacagatcgctttctcttttgtgcgtgtgaccttcttgggtttgcagcattgggtcccggagctggcccgcctgaaccgcgcaggcatggtcaatgcctggacacccagcagcaatgacgataacccctggatccaggtgaacctgctgcggaggatgtgggtaacaagtgtggtgacgcaaggtgccagccgcttggccagtcatgagtacctgaaggccttcaaggtggcctacagccttaatggacacgaattcgatttcatccatgatgttaataaaaaacacaaggagtttgtgggtaactggaacaaaaacgcggtgcatgtcaacctgtttgagacccctgtggaggctcagtacgtgagaatgtaccccacgagctgccacacggcctgcactctgcgctttgagn

SEQ ID NO: 34552 - DNA, 498 bp, Homo sapiens
tggccccattgaatagattgtcctcgagcacgcccagcttggcacgaggcccgggaaaacatgcgtgagtgcatctccatccacgttggccaggctggtgtccatattggcaatgcctgctgggagctctactggctggaacacggcatccagcccgatggccagatgccaagtgacaagaccattgggggaggagatgattccttcaacaccttcttcagtgagacgggggctggcaagcatgtgccccgggcagtgtttgtagacttggaacccacagtcattgatgaagttcgcactggcacctaccgccagctcttccaccctgagcaacttatcacaggcaaggaagatgctgccaataactatgcccgagggcactacaccattggcaaggagatcattgacctcgtgttggaccgaattcgcaagctggccgaccagtgcacgggtcttcaagggttcttggtttccacagctttggtgggggacttgttt

SEQ ID NO: 34553 - DNA, 422 bp, Homo sapiens
ggactgcccagagctgagccctgaactgatctggctgggcctttaggggttgggggagcccgatatgctgaaccgggtgcaggaggacaagggcacctgggtgcaggtgtcactgctgcacttcgtgcccacgagggaggtcaacggccacaggctgggctgccaggcctacttccccaacaccaccctgcagttcgagggctacgccagcatggacgtcatgtaccccccggtgattgtggagatgaactccttggtggaggccatcgagggctcccacgtgagcctgctctgtggggctgacagaaaacccccgccgctgctgacctggatgcgggacgggacagtactccgggaggcggtggccgagagcctgctcctggaactggaggaggtgacccccgccgaatactgagtttatg

SEQ ID NO: 34554 - DNA, 418 bp, Homo sapiens
ggagccttttgggtaaacactgggaactccagaagttgtggggagagtggggaatcagacagccgcctctaggggctgggttctgctggggcctccttgttggtgctgtaggcacccgccagggagcagggacccgacttgcagacgcattgcccggtactaggaaggagtgaggtgtgttcccaccgtacacttcccacacgagctgcggctgccagcctcgggccatcagcctaggagagcagatgcagctccaggggctcgacttatagccagttacagctccccggctcttctgtgtggcagagcgtcgtttccgggccctcagggctggggagctcagttcccattgcttgtgctcagggctgagtcttaaagaagggtttgccggccctaacgctgcagcgcgtgcgcggtg

SEQ ID NO: 34555 - DNA, 493 bp, Homo sapiens
  misc_feature (1)...(493): n = A,T,C or G
tggtggtncnagaagcgaacantttgannnccctttgataacattatgacctgattacgcccgggtggactcaaggttgaatgtcaaaggcagaaagttacaacctgggaatacaggataatgcctttgtaccccccaggtagggaaagatttcttaagtgagaaacagcatcccatacagcacaactgggcactgcctactcaacagccaaggcttggccatccccactcctcagtatgggccccagaacccaggacctgggggactctgcacacaggcatgtggagaccacggaagcctgcccaatatagcgctgccaggaacagcaaagacaaaaccagagaagcctatcgcgggcaccgctgtgggcagaactatgtcccttcaatatttttatgttcaagtcctaacccctagtacttacatttgaagacagggtctttaaagaggtaattcagggttaaatgaggtcatgagggtgggccctgatcc

SEQ ID NO: 34556 - DNA, 448 bp, Homo sapiens
ggagctggagcggatcagcgtctactacaacgaggcctcttctcactaggacgtgcctcaagccattctggcggacctggaacccggaaccatggacagtgtccggtcacgggcctttgtacatctcttcacgcctgacaatttcatctttggtcacagtggggccggcaacaactgggccaagggtcactacaccgagggggcggagctggaggattccgtccttgatgtggggccgaaagagtgtgaaaactgtgactgtctgcaaggctttcagctgacccactcgctggggggcggaacggactccagcatgggcacgttgctcatcagctaggtgcgtgaggagtatgccgaccgcatgatgaacaccttcagcgtcgtgccattacccaaggtgtcagacactggggtggagccctacaacgccacgctggtcatccaccag

SEQ ID NO: 34557 - DNA, 502 bp, Homo sapiens
  misc_feature (1)...(502): n = A,T,C or G
cgcgccccaatgaatacaattgcatatgacacgccaagcttggcacgaggcccgggaaaacatgcgtgagtgcatctccatccacgttggccaggctggtgtccatattggcaatgcctgctgggagctctactggctggaacacggcatccagcccgatggccagatgccaagtgacaagaccattgggggaggagatgattccttcaacaccttcttcagtgagacgggggctggcaagcatgtgccccgggcagtgtttgtagacttggaacccacagtcattgatgaagttcgcactggcacctaccgccagctctttcaccctgagcaacttatcacaggcaaggaagatgctgccaataactatgcccgagggcactacaccattggcaaggagatcattgacctcgtgttggaccgaattcccaagctggccgaccagtgcacgggtcttcagggcttctttggttttcacaggctttggtgggggaactggntn

SEQ ID NO: 34558 - DNA, 412 bp, Homo sapiens
gagtttagtctgccattaaaaaaactcattctcatctcatgcattattatgcttgctactttgtcttagcaacaatgaactataactgtttcaaagactttatggaaaagagacattatattaataaaaaaaaaaaaagcctgcatgctggacatgtaggggaaaaaaattttttcctttttttttcctttgggctgggaaagggacgttcaaaaacttatagcagggcattcatactttggtttaatggccccaggacttttttgagttaaaaacaaaacagggcaaccggaaagcctttttcccatgaaattttgcatctgccccaaaactggtttgagttactaaaaacttcaacctcccaaggcactgaaggcattccttggcaaaaataccaaaatgggttacccat

SEQ ID NO: 34559 - DNA, 458 bp, Homo sapiens
  misc_feature (1)...(458): n = A,T,C or G
ggttgagnacagttgaaaactcattacgccaagcttggcacgaggccaccacactacacagcacaccagccgctgcagggctcccatgggctgagtggggagcagttttcccctggcctcagttcccagctccccccgcccacccacgcatacacacatgccctcctggacaaggctaacatcccacttagccgcaccctgcacctgctgcgtccccactcccttggggggggggacattgctctctgggcttttggtttgggggcgccctctctgctccttcactgttccctctggcttcccatagtggggcctgggagggttcccctggccttaaaaggggcccaagccccatctcatcctggcacgccctactccactgccctggcagcagcaggtgtggccaatggaggggggtgctggcccccaggattcccccagccaaactgtctttgtag

SEQ ID NO: 34560 - DNA, 387 bp, Homo sapiens
  misc_feature (1)...(387): n = A,T,C or G
gggtggagacccacgagccgaggcctcctgcagtgttctgcacagcaaaccgcacgctatggctgacagccgggatcccgccagcgaccagatgcagcactggaaggagcagcgggccgcgcagaaagctgatgtcctgaccactggagctggtaacccagtaggagacaaacttaatgttattacagtagggccccgtgggccccttcttgttcaggatgtggttttcactgatgaaatggctcattttgaccgagagagaattcctgagagagttgtgcatgctaaaggagcaggggcctttggctactttgaggtcacacatgacattaccaaatactccaaggcaaaggtatttgagcatattggaaagaagactcccatcgn

SEQ ID NO: 34561 - DNA, 406 bp, Homo sapiens
ggtgctgcatcccctttttggaattgctcaaccaggtggtaaccggcgccgcttcctggccttgggaggtggttcctttcttaacccacaagaacctctcccaagagaacttggtcctgatgtctgaccatggagatgtgagcctcccgcccgaagaccgggtgagggctctctcccagctgggtagtgcggtagaggtgaatgaaaacattccaccccgtcggtacttccgctctggagttgagattatccgaatggcatccatttactctgaggaaggcaacattgaacatgccttcatcctctataacaagtatatcacgctctttattgagaaactaccaaaacatcgagattacaaatctgctgtcattcctgaaaagaaagacacagtaaagaaattaaa

SEQ ID NO: 34562 - DNA, 479 bp, Homo sapiens
  misc_feature (1)...(479): n = A,T,C or G
aggaggggnnnnnnncctgagaccttgatgaccgtcttacgccgagcttggcacgcgggaaattaaagcttctcggaataatttaggaacagcttgacccgttgtgatactcaaggaccacccttcagggaaatagtatgtttccttcctgtgaacaagaagctctcgcggtgcaccgggaggtatctggtgtcaacaatgccagagcgccctctgctgcctcaaagaggccggacaccagttacaaaagccagatggcacagtggcaataagcggaggaaacattaagctcttagaaacgtttaatctgtgaaatttaaaagctctcatcatattctacttttgaaagggccacctgattttgattttgagcactccttggatgttatcttctattctggaggataatgaaaagtccgtggtttgaaagtgtcacattatttctggaggtatatttcttcacttctttttcgattttt

SEQ ID NO: 34563 - DNA, 387 bp, Homo sapiens
ggggagatggcgaggatgtctattaatatggtgtttcctgcaaaacggggcccatctcaaccatgggttgtcaaccatcctcggtgtctacaactgcaatttacctttgagggcccatgaactctgattacctgaaagtccttaggccagaaagagaaacccctgtcccccacctctcactttcacctatttctagaccttttcttacagcaatgccttggccctcaggaagcatcagatctcaaactgcagggtctggggctgaagctgatgctggcatgggtgactcaaagttcctctattagttcaaatatgtaatatcttttagagcctaggactcaggctggaggcaattccttggtgccagttggttaatactttatgaat

SEQ ID NO: 34564 - DNA, 400 bp, Homo sapiens
ggattttgttggtgaggaagaatgtaactttgaatccagatcccaatgagattaaaagctattgttatgtgtcaaaggaagaactaaaagaacttctgaaaaaagcagccagtggtgaaattaagataacgccatggtttaaaattattgcagcgacttttctctttaaatggtgggataacttaaatcatttgaatcagtttgttgaccatgagaaaatatacagaatgtgaatatgtaggtaaatgattacagaaaaatttatctgcttaacaaacttagaatgactttttccttttaaatttagttctatcattaatttatcattaaatttagttctatcatttggtactatcattaatgtattatatacactgatactttaaaacttgtgtggaaa

SEQ ID NO: 34565 - DNA, 446 bp, Homo sapiens
  misc_feature (1)...(446): n = A,T,C or G
nttgaaacatgatgacatgattacgcccagcttggcacgaggcactgtggtaggcatttggcatattttgtggactcagtcaagcaaccacagtctgttaatcatttctctatgctcagatgtcagatcctcttgttattagtgtgtcttgttctgcacagcgcaggagactttattcctttggaaaattcactgttccacaaacagcaggctgaatggcctcgcctctagattgacgtgggccagcctccttgagacacacctggtacccgtcatcggccagcggtggatgctgcataatccacctgggtacttcagccttgcgtttccacagccttcagcctgttctagaacgatcactgccttacccctgctgctgcagtggtgtgagtcgtttcacggctgatgtccctcgggggattaaaggatctaaagagaaaatggcc

SEQ ID NO: 34566 - DNA, 434 bp, Homo sapiens
ggcctcgtgccaagcttggcacgaggccaaaaaatgcgataaggaggttaaggccgaaaaggccaaaattaaaaaggccattcagaagggcaacatggaagttgcgaggatacacgccgaaaatgccatccgccagaagaaccaggcggggaatttcttgagaatgagtgcgcgagtcgatgcagtggctgccagggtccagacggcggtgacgatgggcaaggtgaccaagtcgatggctggtgtggttaagtcgatggatgcgacattgaagaccatgaatctggagaagatttctgctttgatggacaaattcgagcaccagtttgagactctggacgtccagacgcagcaaatggaagacacgatgagcagcacgacgacgctcaccactccccagaaccaagtggatatgctgctccaggaaatggcag

SEQ ID NO: 34567 - DNA, 424 bp, Homo sapiens
gggctggtttgattcctgatcacccaactggacagggccctctccaggacctcccaggttctccctggtaccttccctccctcaggaggaggcagcactgtctctgaagccaccaacgagtaatgctagaagaatcagaagaaggaagtatctgatgaaaaggcacctgcaagtctaaagtcctctttggtgagaacactgtacatccgctgaggcagagctttggagtagggagcagggcgcggcacagtggtgcgcaaaatgaattcccggccagcagggggtgggaagtctgacacggagttctgccttctttcctctggggagcccattctcttcaattcctcctctggtggagtcatagctgcagccctctgggcattcacaaacagcttgtgaatgatcctgccagcatgtcctcttc

SEQ ID NO: 34568 - DNA, 418 bp, Homo sapiens
aagtgaaaaagcctctagtcaccacttactcccttttaacaggcagaaaatcaacctggtgagcactccctggagtgtaaccattgtgggaaattcagaaagaacactcgctttatttgtacaagatattgcaagggagagaaatgctataaatatataaagtatagcaaagtcttcaaccatccctcaactcttaggagtcatgtgagcattcacattggagagaaaactcttgaatttactgattgtagaaaagctttcaatcaagagtcatccctcaggaaacacttaagaactcccacaggacagaagtttcaggagtatgagcaatgtgatatgtccttcagcctacactcttcctgctcagtacgtgagcaaatacctactggagagaaaggtgatgaatgcagtgactatg

SEQ ID NO: 34569 - DNA, 398 bp, Homo sapiens
ggaaagcagaacagcctcccgaatgaagcgttgccattgaactcaccagtgagttagcagcacgtgttcccgacataacattgtactgtaatggagtgagcgtagcagctcagctctttggatcagtctttgtgatttcatagcgagttttctgaccagcttttgcggagattttgaacagaactgctatttcctctaatgaagaattctgtttaactgtgggtgtgccgggtggggtgtgtgtgatcaaaggacaaagacagtattttgacaaaatacgaagtggagatttacactacattgtacaaggaatgaaagtgtcacgggtaaaaactctaaaagggtaatttctgtcgaatgcagtagatgatgaaagaaaggttggtattatcaggaaa

SEQ ID NO: 34570 - DNA, 418 bp, Homo sapiens
ggccggagctttactttaacgtggacaatggctacttggagggactggtgcgcggcctgaaggccggggtgctcaaccaggccgactacctcaacctggtgcagtgcgagacgctagaggacttgaaactgcatctgcagagcactgattatggtaacttcctggccaacgaggcatcacctctgacggtgtcagtcatcgatgaccggctcaaggagaagatggtggtggagttccgccacatgaggaaccatgcctatgagccactcgccagcttcctagacttcattacttacagttacatgatcgacaacgtgatcctgctcatcacaggcacgctgcaccagcgctccatcgctgagctcgtgcccaagtgccacccactaggcagcttctagcagatggaggccgtgaacat

SEQ ID NO: 34571 - DNA, 488 bp, Homo sapiens
  misc_feature (1)...(488): n = A,T,C or G
ntaatgacgntatngtantgataancactcgaacangaccacgccaagcttggcacgaggctaaggcaagtttgcttccttctacttcttacaaattaagagggttaggggagcttcttgcccagaaacaagggttatgctctatgtgatcagctacatctccttaggttccatacttatcaggggcttttgacatggaagaatgtgataattggggagcaaccttctgagaattcagcctttgaagtaattcaaagacagtttcttagcacacacgttaactccagacacagcagtggggggtgcctccattgaggtttccgttttctcttctgtccatcaagggcccaacatccaactggtcccacagtgagcaggggcaactcttgcttcttcagcatctggccacttcgtttccatggtaactgccacgtgtacttttctagcagtctgtggccactccgtactcagctgaaggcactgttgcg

SEQ ID NO: 34572 - DNA, 412 bp, Homo sapiens
  misc_feature (1)...(412): n = A,T,C or G
ggctgcatcatggaggtgtcctgtggccaggcggaaagcagtgagaagcccaacgctgaggacatgacatccaaagattactactttgactcctacgcacactttggcatccacgaggagatgctgaaggacgaggtgcgcaccctcacttaccgcaactccatgtttcataaccggcacctcttcaaggacaaggtggtgctggacgtcggctcgggcaccggcatcctctgcatgtttgctgccaaggccggggcccgcaaggtcatcgggatcgagtgttccagtatctctgattatgcggggaagatcgtcaaagccaacaagttagaccacgtggtgaccatcatcaangggaaggtggaggaggtggagctcccagtggagaaggtggacatcatcatcagcgagt

SEQ ID NO: 34573 - DNA, 528 bp, Homo sapiens
  misc_feature (1)...(528): n = A,T,C or G
gtgactgttctgttggtaatgtttaatctctgtcgctactacgaatgtgacccccccccctggggtgngttggactgatacatccgnacacanacgccaagctggacgagcgaagcttcggtagcggcccgcagagcctgacccttgctctttacatcctgagcccaagtcccccacactcattgcagtgatgagtgcggaagtgaaggtgacagggcagaaccaggagcaatttctgctcctagccaagtcggccaagggggcagcgctggccacactcatccatcaggtgctggaggcccctggtgtctacgtgtttggagaactgctggacatgcccaatgttagagagctggctgagagtgactttgcctctacctttcggctgctcacagtgtttgcttatgggacatacgctgactacttagctgaatcccggaatcttcctccactaacagaggctcataagaataagcttcgacacctctcacgttggaccctggctgctaaagtaaaggggatcccaag

SEQ ID NO: 34574 - DNA, 479 bp, Homo sapiens
  misc_feature (1)...(479): n = A,T,C or G
aggggttttnattgagacctgtatacctgctnacgcccagcttggcacgaggcaagggaggagggagattagagaaggagccagggagggtggcagggaggccacgtgatccgagtcccctcacccctttccttcccacaggtccctggccaaagatttatttctcttgacaaccaagggcctccgtctggatttccaaggaagaatttcctctgaagcaccggaacttgctactaccagcaccatgccctaccaatatccagcactgaccccggagcagaagaaggagctgtctgacatcgctcaccgcatcgtggcacctggcaagggcatcctggctgcagatgagtccactgggagcattgccaagcggctgcagtccattggcaccgagaacaccgaggagaaccggcgcttctaccgccagctgctgctgacagctgacgaccgcgtgaacccctgcattgggggtgtcatcc

SEQ ID NO: 34575 - DNA, 477 bp, Homo sapiens
  misc_feature (1)...(477): n = A,T,C or G
nggcgaannaattgaaaacattatagaataacttcgccaagctcggcacgaggtccacatcgattcacccgacaaagtctgaagttccagggcaatttatctggaaaagctcacctggaatcatgtgtcatttcaaccaacaactgtcgaagaggacgtggcatcaaaaccaaggttatcaattatttataagggttgtgtggtggttggtccaagcatctctccttcatgccatcactcctttcaagagctgcctctattttctaatttagcacaggaatttagatgcccctaaataagtaggcatccagtatctgcccacaccagttttagtgagagtacatatggagacactgccaccacccctgctctcctactgcataccccaccatgccaaagcatggtggctcacacctgtaatcccagtgctttgggaggccaaagaggaggaacacttgaggccagaagtatgagacc

SEQ ID NO: 34576 - DNA, 479 bp, Homo sapiens
  misc_feature (1)...(479): n = A,T,C or G
aggcgtgngtttggttcggtagtaccgtccgaccngcanacgccagcttggcacgagggtcgcgctgtaaaaaacaacaacctctcctcttcgttttcgccatcagctcggcagtcgcgaagcaccaaccatgcgtgagtgcatctgcatccacgttggccaggctggagtccaaattggcaatgcctgctgggagctctactgcctggaacacgggatccagcccgatggccagatgccaagtgacaagaccattgggggaggagatgattccttcaacaccttcttcagtgagacgggggctggcaagcatgtgccccgggcagtgcttgtagacttggaacccacagtcattgatgaagttcgcactgggacctaccgccagctcttccaccctgagcaacttatcacaggcgaagaacatgctgccaataactatgcccgagggcactacaccattggcatggagatcattgacg

SEQ ID NO: 34577 - DNA, 411 bp, Homo sapiens
ggagtcactgtggcccctcatctttccacgcacttagcacagtcatctcctcgtggcctccagagtgctcacccccaacactaagtgtgatgtcacacctgcctacctgctgggctccaccgcagcatacatcatctctttctgtttcttgaactggtggaaatagaaaaaaacagatggaggagaacccagacagaaagggtagcacacgggactcttgtgggccggggaccacaggatgaacagagagtagggttggaggatactagagcaggcactcctaaatttgagctttatcttcatgtggatgagccctcagggtattgtttgaggaggaacttggattcacagtgacttgggggcttggtacagcttaaagatggtgacgtggctcacgctctctgatctgct

SEQ ID NO: 34578 - DNA, 389 bp, Homo sapiens
gggtgaaattggaacgatacagagaagattagcatgtcccctgcgcaaggatgacacgcaaattcgggaagcgggccatatttttaaaatcttcaaatctgtctgtaacaactgatttcttcgaaagccttcatagctctaatattgaatccaaagaaatcaatggcattcatgatgaaagcaatgcttttgaatcaaaagcatctgaatccatttctttgaaaaacttaaaaaggcgatcacaattttttgaacaaggaagctctgattcggaggttgctgatcttccagttccaaccatcaatgccccgagtcgctgggcgtgggatcaaaaggaggagcggaagcggcaggataggtggctgaatgagcatgaccgcctactgcag

SEQ ID NO: 34579 - DNA, 403 bp, Homo sapiens
accaaggttgggtgtccacagatttggtgggggaactggctatgggttcacctaggtgctcatggaacgtgtgtcaaatgattatggcgagaagtccaagctggggttttctatttacccggggccccaggttttcacaggtgggggggggccctacaattgcatcctctccacccacaccaaactggagcaatctgattgtgccttcatggctgacaatgaggccatttatgacatctgtcgtaaaaacctctatattgagcgtccaacctatactaacctgaataggttaataggtcaaattgtgtgctccatcactgcttgcctgaaatatgatggagccctgaatgttgacctgacagaattccagaccaacctggggccctattaccgcatccacttt

SEQ ID NO: 34580 - DNA, 476 bp, Homo sapiens
aattgataaactgatgaccattacacgccaagcttggcacgaggaattcaccctcaagggcgccaaggactgtgtggaggcagccaacaaacgcattcaagagatcattgaggacctggaagctcaggtgacattagaatgtgctataccccacaaattccatcgatctgtcatgggccccagaggttccagaatccagcagattactcgggatttcagtgttcaaattaaattcccagacagagaggagaacgcagttcacagtacagagccagttgtccaggagaatggggactaaactggggaggggagagaggctaaagattgtgaccccggctctccaaggaggggtgacattatcatcatctctggccggaaacaaaagtgtgaggctgccaatgaagctctggaggcattggttcctgtcaccattgaagtagaggtgccctttgacctttaccgctacgttattgggg

SEQ ID NO: 34581 - DNA, 401 bp, Homo sapiens
  misc_feature (1)...(401): n = A,T,C or G
agcatatacctcattgactaggctgttactttgggataggttgcagtaccagccacagccagcagatagaggaaaagacacacataaactcgcttctgagcgtccacttctgcactctctgctctgctgttactcagcccctgagtctgactcatctctgcacaacctctctgtgccatgaagataagtcttccatggccaaatcggtcatccgcactgcccttgggacttccgaagtgaaccattccaccagaacctttgattctgcacaagatttccttgctctgggaacaacccccaaatgcccttgggaggaacaacatgagctcaggaagcctctctttcttcacttaccattactaactctccaagcatagaaatccctgggaattgcgagaatn

SEQ ID NO: 34582 - DNA, 470 bp, Homo sapiens
  misc_feature (1)...(470): n = A,T,C or G
agaggccnnnnncctgaaatcgtatcacttgcctacgccaagcttggcacgagggctcctgtttctgaagcatcttaccagaagtgtgtgtctcttgcttgagccatgcctcttgccctagagtgatcctgagaaccactgctatttatgtcttagtgctgtattgccttgtatttccttctcagttacatggacacagaacagtatgaagaagcagtacgagactatgaaaaagtataccagaccgagaaaacaaacggtaagtttaaaagcatttgttttttagggaactgtgtggacttcgtaggccataaatctgtacacaaggtagtttgattcagggatcagggatctacctagaacttatttgatcaccagccagaaagaagtgaacaaaggctgggcgtggtggctcacgcctgtaatccccagcactttgggaagctgaggcaggcagatcacctgagatc

SEQ ID NO: 34583 - DNA, 430 bp, Homo sapiens
ggattttttttaactttcaacattaaaaagatactattttattggcttcccatgtttttgatgaaagtcagctgacattcttatgaatgtaattttttttctttgactgctataagatttttccctatttttggttttcagcagtttgattataatataccaaattcgtagctccgttctactgccatctcctgtgtgggcctcagttttgattagtttttattagcctacctttgaattcattgatcccttctttttctgtgtccagtctgctgttaaacccatctggtgacttcttcatttcagatcatttatttttcagttctagaatttccctttctctgctggaattctttgctctttacccattctgttgatcttttcctctaaattatttaacatattcataataacttttaaagtcttcatc

SEQ ID NO: 34584 - DNA, 413 bp, Homo sapiens
ggagtgcctgtaagaaccacactgtaaagaactcatcattaatgcttgaaaatgttattaagaaggagacttaccatgcagacattccctatttaagaaccatttggttacagtgggttaagaatcacagatttttttttttaatctcacctgagttagcctaaaatgcgctggttgcaaaggggtgtcagctgtggggatcttgggccctcgttcctcacctgcatcctgccctgcactcaggtgctccccctgaagtcagggtcacatcaggtagacctgttactatatgcacctttggcctggaatgctctgaagttggactggaaatgttactaggttggcctgttacaaaaaggaccccatcctgcttaaacacattgatctcccttgccctgcatttgagtctttct

SEQ ID NO: 34585 - DNA, 437 bp, Homo sapiens
gggcaactggcttgaccacagactgaagcaaggtgccacttaaacagatactgttttctcaaaggggcaaaggaatcgtgttgcagatggccaccttttctgcttcatttttcccacattttctctggccctctaccttgcttcctgggagtttgatttaagattgctgatgaaggctttctcaggcaaactccagcttaaagccctacacaggtaaaagcacacattggatggcaacatgggtttcttcccattttatgggcatgaaatatgtgggttagaataaggaacaagcattattcctttgccaacagcctcactctaagaggctttttttgctgagacaagcaaacacttgcctgctctgccccttggagctgcatttgacctgctctcactggtaaggtgacttggcggcgttccacttgattagcctt

SEQ ID NO: 34586 - DNA, 410 bp, Homo sapiens
gctcacagacactgttcccatccactcttggatccacccatggctgccccttatgcaggcacgggtggagccactctattcccccatccgtagtaagctgtccagcgccctgcagaagtggcaccccagcgactcctctgccaagctcatcctccagccctggaaggatgtcttcactcctggctcctgggaagcattcatggtcaaaaacatagtgcccaagctggggatgtgtcttggtgagctagtcattaacccccaccagcagcacatggatgcattctattgggtgattgactgggaagggatgatctctgtctctagcctggtgggacttcttgaaaagcacttcttccccaagtggcttcaggtgctgtgctcttggctcagtaacagcccaaattatgagg

SEQ ID NO: 34587 - DNA, 401 bp, Homo sapiens
actggtatgaggggatgctgcatggccattcaagcttcttccccatcaattatgtggaaattctgggtgccctgccccattaagatgctatgctgggtggctcgccttctcttgacccagatagttacggttaaccactgctttggcaatgctgcttataacacatcccaagtgcaggccgcagtggtccacagtcatccagccccaccaagtgactttgtgtgacttgcgggctcccacacgagtcatggtgatggatgatatcctcttagcctggggggcatggcatgcgctttttaaaacatcatctgagaccagccaggagtcacagaactgctgattacacagctctcaggagggtgcggtttcttagaatatgaccatgagccatttcacagaaa

SEQ ID NO: 34588 - DNA, 413 bp, Homo sapiens
ggctcaattggcgtccaagggagtctgtaataagggatggcgggacgtcacctcctttttttcggggaaagcatagggccccttggacagccccttggagggccacagttatcataacagcggtctggaccactttcaaaacagcaacatagaccagagcttctgggagacctttggaagtgctgagcccaccaagacccgcaagtccccgagcagcgacagatggacgtgcgcggacacctccaccgaaaggaggagctcggacagctgggaggtgtggggctcggcctccaccaacaggaacagcaacagcgactggggggagggcggggagggcaccaataaagcaatgccgcccgccgtgcccactgatgatggctgggacaaccaaaactggtaaggcccactgcgcg

SEQ ID NO: 34589 - DNA, 405 bp, Homo sapiens
ggctcagttggcgtccaagggagtcggtagtaagggatggcgggacgtcaccacctttttttcggggaaagcagagggccccttggacagcccctcggagggccacagttatcagaacagcggtctggaccacttccaaaacagcaacatagaccagagcttctgggagacctttggaagtgctgagcccaccaagacccgcaagtccccgagcagcgacagctggacgtgcgcggacacctccaccgagaggaggagctcggacagctgggaggtgtggggctcggcctccaccaacaggaacagcaacagcgaccgcggggagggcggggagggcaccaagaaggcagtgccgccggccgtgcccactgatgatggctgggacaaccagaactgtgagggccc

SEQ ID NO: 34590 - DNA, 452 bp, Homo sapiens
  misc_feature (1)...(452): n = A,T,C or G
nttgaaaccttgtggacttattacgccaagcttggcacgaggtgcttggatggtgtcttcctctcctcagccgagaatgacttcgtccaccggatccaggaggaactggaccgctttctgctgcagaagcagctgtcaaaggttcttcttttccccccactctccagtcgcctccggtacctgatccatagaacagcagagaattttgatctcttgagcagcttctccgttggggagggctggaagaggaggacggtcatctgtcaccaggacatcagggtacccagttcggatgggctctctggcccctggcgcgcttctgccttctgccccagcaggtaccacggtcctcggcccatctccaaccaaggagcagctgcggttccccgaggtgcccgggctggccggtggtatcgtggacgcaagcctgaccagcctttgtatgtgccccg

SEQ ID NO: 34591 - DNA, 425 bp, Homo sapiens
ggggggtagataatggaggcttaccaccagcttacacagcctgagaatcaaaaccactgacagctccgtgcaggcaatggggacacctggacgggcggaaccactgagtttcttgtctcccgtgacaggtctaatcaggacttccccaaaacggggcttgcctgtgccctctgacctgcatgtctgaacacagcatggataggcctggcaggatatggaggaggacacagaaggggaggagtgggtgggagcaaggccatttccttatataaataagtcgcagcctctcgtattgcaacagttgtgaaaaagtccacacccatttcagagttttgaaagacttcatctgagataggtggagagggccaagtgcccctctgaagctctttcctgcgtgccatccgttccctgacccatattcgttt

SEQ ID NO: 34592 - DNA, 405 bp, Homo sapiens
ggggttaacttatagaaaaatttgattttgcctctttactggacttttgtaagacctgtcttcccaatgacaaatatcccttgcttcacaatcacaccttgttcatgtcattgctttttggcagcacttacatttgtgagctactattttcaaggatgaagaacacgaagagtaaaattagaaccaaaatatctgatgagcaccttgagaactcactgagaattgcaactacttccatcaagccagatactgatggattagtttctcaaaaacaatgtcaagtaccccactagttttatgttggtctcttttcttttataataaaaaatatcacaaaagtagtgaagtttagctagatatgtacattttctgtatcagtgattgcaaacttggaacctgttcaag

SEQ ID NO: 34593 - DNA, 465 bp, Homo sapiens
  misc_feature (1)...(465): n = A,T,C or G
agagtagacttggatcttgatacctctgatanacgtntacaccaaccttggnacgaggatgtcgaagtgctggaataaggtcatcatggtcacaggagaccattcaatcacttttaaagctattgccaaaggtgggggcatcatggcagaaggcaatgagaccgtggaagacattgctgcccgcctcaacatcccaatcagccaggcgaaccccagggatgccaaggcctgcgtagtacacggcagtgatctaaaggacatgacctccgagcagctggatgacattttgaagtaccacactgagatagtgtttgccaggacctcccctcagcagaagctcatcattgtggaaggctgccaaagacagggtgctatcgtggctgtgactggagacggcgtgaatgactctccagctttgaagaaagcagacattgggcgtgctatggggattgctggctcacatgt

SEQ ID NO: 34594 - DNA, 473 bp, Homo sapiens
  misc_feature (1)...(473): n = A,T,C or G
agatggtcnnnnnncctgagatcgtatgcctctgcctacgccaagcttggcacgagggacaaaggggtttatatcattggaagcagcggctttgactccattccagcagatctgggagtaatatataccagaaataaaatgaatggtactttgactgctgtggaaagtttcctgactatacattcaggacctgaggggttgagcattcatgatggtacctggaagtcagcaatttatggttttggagatcagagtaatttgagaaaactaagaaatgtatcaaatctgaaacctgtcccgctcattggtccaaaattgaagagaaggtggccaatttcttattgtcgggaactcaaaggttattccattccttttatgggatctgatgtgtctgttgtaaggaggactcaacgttacttgtatgaaaatttagaggaatcaccagttcagtatgctgcgtatgtaactgtggg

SEQ ID NO: 34595 - DNA, 419 bp, Homo sapiens
ggggctgtccagtggttttaataagaagtaacgaagtaggaaggtagaacctgaacctaagtacgactgtgggctctcgagtgcttcaacttaacaccattgcccatttcagcaccaactcccctgtacctccagatggtgggggcctcgagggcagactaataccatcaggccttttcaggcctggactccctggcccaccctgcttagcacctgcggatctcaggggccagatgctccatgtcctggcggaagacgtagggagggatgctgacaatcaagtccatggggccccagggcaagtgagacagctcctttctgtcgtccaagaagaggacacacagtatggactatcccattgggaagtgaaggatgatagctacacctgccaccatgtgcctctcaccatgccacacctt

SEQ ID NO: 34596 - DNA, 420 bp, Homo sapiens
ggcactaattgagggagtgaggaagagagcagctcgcttctaactggactgcacgttggtgacagcgtcccaagctggtgacagacccactctgtaactttcagctagattcagccaccagatcccagaaacatgacccttgctgcctacaaagagaagatgaaggagctcccgctggtgtccttgttctgctcctgcttcctggccgatcccctgaataagtcgtcctacaaatatgaaggctggtgtgggagacagtgtaggaggaaggatgaaagccagcggaaagacagtgctgactggagagaaagaagagctcaggcagacacggtggacctgaattggtgcgtcatttccgacatggaagtcatcgagctgaacaaatgcacctcgggccaatcctttgaagtcatcctgaaa

SEQ ID NO: 34597 - DNA, 413 bp, Homo sapiens
gggctgccaataactatgcccgagggcactacaccattggcaaggagatcattgacctcgtgttggaccgaattcgcaagctggccgaccagtgcacgggtctccagggcttcttggttttccacagctttggtgggggaactggttctgggttcacctccctgctcatggaacgtctctcagttgattatggcaagaagtccaagctggagttctctatttacccggcgccccaggtttccacagctgtagttgagccctacaactccatcctcaccacccacaccaccctggagcactctgattgtgccttcatggtagacaatgaggccatctatgacatctgtcgtagaaacctcgatattgagcgtccaacctatactaacctgaataggttaataggtcaaattgtg

SEQ ID NO: 34598 - DNA, 436 bp, Homo sapiens
ggccgaatgctttcttgaagttggctaatgtgttgttcactgaatgactgacctacagttgaggaagactggcacaccatggtgtctgacacctcagatgttataggtgtacaagagtctgtttcttgagatgtgctgctgtctccattttgggagcttaggaaactagattcctgattcaaattttggacatcacagtcattagcattatgtagatcctctttatgtctcaatgtttcattattactggtctgagtataattaatgacttcaatcactccattgcaattaatttctgctgcaccaccctctgtatcacgttccataagcgtttgatcctggccaatggtacttgactcttctaaggaacaaacgaacaaaaaaagatatatgcatatgtgtgtgagtgaaagaacagaaacatttctcacaagat

SEQ ID NO: 34599 - DNA, 402 bp, Homo sapiens
ggactggacaaggtcactacagactcagtgcccaaagtttttactgatgacaggtcatctaggcaggctttccctggcagatagcaaaattcaagactctcaaaaggaaagcaggtgttcagcataagccatattgtttgcacaagcagttcagacacagtaagccagtcttatcagttaattgtgggagcccctccaaaatctaagttcccaaatgccggccagtggccaaccctgtaatcaggcctctccaaggatagcagtttaggcctgctatgttaactcttttctgcacaaaacctatagagttagggctttggatctgagatgaatgaagtgtgggtagatttactgagtcctgttatatgggttctgccctaccaggaaaactatgccagttct

SEQ ID NO: 34600 - DNA, 490 bp, Homo sapiens
  misc_feature (1)...(490): n = A,T,C or G
tggagttcccaggaacannnnaattgataacgctggacctgcctacgccaagcttggcacgagggtcgattcaactgcctgtcagtcgattcacctgcctgtcacccacttctgtggatgtgctgaggctgagcctttgctctctttccaaatggttacagggatgttgatcagctccaccaaagggagctctgatgggaggaattgctctgccatccttgtccctgtgtctcctgtcggcaggcagccattgtatctcaccagcagaccaggagactggtcccaaggttactgcaccacagggcaatttactgccatagttaagaaggaaacacctgaactaaatggaagagacatccctgcggtgtttaatatcacacccatgccctttgtcagggtaccatgtacagagattacttggagagcctcatgccagctctaccttcgcacactggtcaagtatctgctgagcttattggccgcaaggatg

SEQ ID NO: 34601 - DNA, 471 bp, Homo sapiens
  misc_feature (1)...(471): n = A,T,C or G
agtgcgtnnnnncctgatatcgtatgcctctgcttacgccaagcttggcacgagggctgccaataactatgcccgagggcactacaccattggcaaggagatcattgacctcgtgttggaccgaattcgcaagctggccgaccagtgcacgggtctccagggcttcttggttttccacagctttggtgggggaactggttctgggttcacctccctgctcatggaacgtctctcagttgattatggcaagaagtccaagctggagttctctatttacccggcgccccaggtttccacagctgtagttgagccctacaactccattctcaccacccacaccaccctggagcactctgattgtgccttcatggtagacaatgaggccatctatgacatctgtcgtagaaacctcgatattgagcgtccaacctatactaacctgaataggttaataggtcaaattgtgtcctg

SEQ ID NO: 34602 - DNA, 478 bp, Homo sapiens
  misc_feature (1)...(478): n = A,T,C or G
agagcgccnnnnnncctgagnactganagcagtcgtcaccatcantacgccatgcttggcacgagggccgttcttctgaaatgagatctcaaagcagtatagttcaaaacaaaaggttttaacaaaaaattggcatatgcacaatttctccaccaatttttgtgtgtcaaccatttagttaacttttccacttgaaaaaatgcaatagaaaaccggacaccatgtttcactatctcagttaatattcacaattacagaggctacaactcaggatacagcatcaccaatgctgcccagagtcagtttatactgaaattaagttctttacaccaagtaaatggttgtccacaaccactggctagtgtacatatgaactaaaatttctagatttggggagaaacaaatgctgctccgatcatctgctctgcttcttctgttcctcaattcatgcttagaaacctttcatgttactcttggt

SEQ ID NO: 34603 - DNA, 476 bp, Homo sapiens
  misc_feature (1)...(476): n = A,T,C or G
agagcgctcnnnnncccttgagatcgtngtgccttgcttacgccaagcttggcacgaggcagcaagtatgtctgcttttgatcctttaaaaaaccaagatgaaatcaataaaaatgttatgtcagcgtttggcttaacagatgatcaggtttcagggccacccagtgctcctgcagaagatcgttcaggaacacccgacagcattgcttcctcctcctcagcagctcacccaccaggcgttcagccacagcagccaccatatacaggagctcagactcaagcaggtcagatgtaccaacagtaccagcaacaggccggctatggtgcacagcagccgcaggctccacctcagcagcctcaacagtatggtattcagtattcagcaagctatagtcagcagactggaccccaacaacctcagcagttccagggatatggccagcaaccaacttcccaggcaccagctcctgcctttt

SEQ ID NO: 34604 - DNA, 473 bp, Homo sapiens
  misc_feature (1)...(473): n = A,T,C or G
gggcgccnnnnnttttgaatacgtgagcattagcaccangcntacgccaatcttggcacgagggctattttatataaaattctaatgtagtaggttattatattctaacagagttttattctgttacaattttaatgctacaggttggacatccctaatccaaaattagaggatttcaggttttcagattagggatactcagtatgtgtgctgcaagtattcaaatctgaaaaactctaaaattctaggctgggattacaggcatgagccaccgtgcctggcctaccctgactcttaaagaaaaaaaaatgtgtttaactttttttttttttttttttacttccccctgttttttttggtaaaaaaacaagttggggtttttaattccccaatttttggccttaggaaaaaatttggtctaaaaatttttaaaacccttgggttttaatttttgttcaaaaaaaagccccctt

SEQ ID NO: 34605 - DNA, 414 bp, Homo sapiens
tataggcgtgagccaccgcacctggcctatgagtggtcttttaattaggaacaaatctaatggaaaggagagttgactgaagctggcccacaagattgtgagctgggcagggccttcatgaaggcttgccaccttgggacgccccagtttactggggtgtcttgcggagtgcaaaaggctttctggcagctgcctgggtttggccagaccctgcctcccctcccgccggccaacccctagtccccttcctgtctccacttgcattcaggggtggctgctgttctgagaacattagaactgggaagagagatggagtcacatggatttttggtgggcattattctaaactttcgtatccaagatagtcccccttattccactgtggcattgccgttctaagcaagtacctgatgc

SEQ ID NO: 34606 - DNA, 423 bp, Homo sapiens
ggcgggagaaagaggagaatcgcccaagcggcctcggttgtcccagttagtggaggcccccgccgcggaaccgggtggtgtatgtgtggtaacaccatgtctgtgcccctgctcaccgatgctgccaccgtgtctggagctgagcgggaaacggccgcgggtatttttttacatggacttggagacacagggcacagatgggctgacgccctcttcaccattcggctccctcacgtcaagtacatctgtccccatgcgcctaggatccctgtgaccctcaacatgaagatggggatgccctcctgggttgacctgatggggctgagtccagatgccccagaggacgaggctggcatctagaaggcggcagagaacatcaagggcttgattgagcatgaaatgaagaacgggatccctgccaat

SEQ ID NO: 34607 - DNA, 410 bp, Homo sapiens
ggaaaaaacacccctcatccagtctcttccagcctagagatcctggcctacccctccgccaaagcgcgcactgagtgcaaaccccagagtcaatccctgtcccggctccgccccccgcgtccgaatcccgcccagccgggccctcaagcccagtcgggactcgagcctagggaggcgaggttcccgcaccggatagaaaatgtcactgaaattcacaaatgcaaaacggattgaaggacttgatagtaatgtgtggattgaatttaccaaattggctgcagacccttctgttgtgaatcttggccaaggctttccagatatatcccctcctacatatgtaaaagaagaattatcaaagattgcagcaatcgatagcctgaatcagtatacacgaggctttggccatccat

SEQ ID NO: 34608 - DNA, 426 bp, Homo sapiens
ggggcttggtgcggagaccccttcgggaggtaggcagcagcgcgcggcctgtattcccacgcgacccctgcccaccctgcgtgccgccgtcatcttcctctctccctgccaggtctccgggctgctgaagaggcgctttcactggaccgcgccggctgcgctgcaggtgacagttcgtgatgctataaatcagggtatggatgaggagctggaaagagatgaaaaggtatttctgcttggagaagaagttgcccagcatgatggggcataccaggttagtcgagggctgtggaagaaatatggagacaagaggattattgacactcccatatcagagatgggctttgctggaattgctggaggtgcagctatggctgggttgcggcccatttgtgaatttatgaccttcaatttctccatgcgagg

SEQ ID NO: 34609 - DNA, 475 bp, Homo sapiens
  misc_feature (1)...(475): n = A,T,C or G
gaagggggggcnnncgattgagaccatgatgaccgtcttacgccattcttggcacgaggaataattctgtatttaaaatatggaataattttaggtttacagaaaatttgcaaagacagtacagagagtttccatgtgccttgtacccagttctctcttaatagtatcatcttttgtagccatggtacatttgtcagaactaagaaattaactttggcatattattagtaactaaactaaaggctttattggatttcaccagtttttcccccaatgtcctcttcctgtgccaggacctagtcctggatatcacattgcattttgacttcatcatattgcttgatgaacaagtgctcctcatcttaatgtagctgaaagttttttttttaatgaattgaattttcgttccaatgtaagacgcctacccttcctgngttttctttaaaatgcttaaaatttgcttttcggacttaan

SEQ ID NO: 34610 - DNA, 474 bp, Homo sapiens
  misc_feature (1)...(474): n = A,T,C or G
gggggggnnnnnncatgagacctgatnacatcatacccctttcgcaagcttagcacgagggaaagagtggaatacagattgccattcaccataaacaacctgacaattaacattaatatattgcttcctccacaggttcctcaggaaaaaccagtgatcagtgtttatccaccaatacgacatcacttaatggataaacaaggagtgtatgttacctctccattagtaaacaattttacaatgcactcagatcttggaaaaattattcagagtctgttggatgagttttggaagaatcctccagttttagctcctacttcaacagcatttccttatctatacagtaacccaagtgggatgtctccttatgcttctcagggttttccatttctttctccatatnctncacaagaagcaacaggagtatcacttctttatctgttgctgacacctgtttcttcttcaacaacaaga

SEQ ID NO: 34611 - DNA, 409 bp, Homo sapiens
gggggtctcactggaccatcaggactgctgccgcccctctggagagagcagctttttatttgtctgtagacagggaacatgatgggcactgacctcctgtaaagaataaaactgtgcccggccagaaaatatgtaatcttaaaaatggatccattcctcctcctctgctttttactttttcggagaggggtcacaatttttcggttcttttgttatgtcactcttaaaatattattgaaacattaatgcagtctttatgacaaaattcccatgggtacattgtcatcctaatagatccagaaaggattaagtgtatgtcttttctagcttttgtctggtgatactaaacattattgtgtcttattcttgctgctaccagtggtctggggactatgaagtgaagtgttgc

SEQ ID NO: 34612 - DNA, 425 bp, Homo sapiens
  misc_feature (1)...(425): n = A,T,C or G
ggaaggaattgaggtgggcaggcagaagagcctggattgctcactgttttgggaaacttacatgttgagatctacagagatccaggaaaccaaagccctgctgagcagagccattttgtggctatttctggaggcccaggagtgtggctgcaagagaaaaggggctggaggaagatccggagggcaggggtgttccctctgctgatgatggatgcccctaacacctgtgcctaacacccctactgaaccccacagctccagccttagtttttggagtcaagtgttaaaggtttctggccagaggaattggggtcttgccatccctgcaatagcccttttatgggctctgggagacagctttagggaataaatggggattttcccctttttctacccactcctttgcttcctccaagacttacccn

SEQ ID NO: 34613 - DNA, 421 bp, Homo sapiens
ggcctcgtgccaagcttggcacgaggggtgtggagatcagggtcggggaggtcatgaggtaggtaggggtcaggatgtggacagtcatgggctggtgggtgtggcagccgtgaagggtgggtggtggcctgggaggcagggcctgggcagggcttctgcacttctgctggttacccaaccccctctgggttcgaggactctccttgacaagggctgagctcttgggcactgcgttggactcagctgtctactgggaggctggggagaatggacctgggagaccttgtttgtcctcttccctgcccagctcttgtagaccccacgcctggctgttcgcagggccaggagctgcattcatgggtgccaccaaccttccacatgagccccagcttccagccccacacgcccacttcttttgcct

SEQ ID NO: 34614 - DNA, 429 bp, Homo sapiens
ggggagcttttcatttttaggaattttctttgatttctctatgtccatgtgctgtcaatattgatagaagctgaaatttgggaacttttatgactacttttcttttttttttttttttggaaacggggtccccttttttcccccggcccgggggggacggggcaaaaaaatacttacgggggggttaaaccccgggggccaaggctaagccaattttcctcccccaccctctggggtgggtggcattaaaaaaggccccaccccccccgggggtttttttgaaaaaggggggcccccctttgggcccagggggggttaaaaccccgggccccaaggggaccccccggcccaacccggggtagggataacgggacatctttttgtgcccccccattttaggcccttttccaaaagggattttttttgggc

SEQ ID NO: 34615 - DNA, 421 bp, Homo sapiens
ggcctcgtgccacggcgccgctccccgctcctcctccccagccatggcgttcacgttcgcggccttctgctacatgctggcgctgctgctcactgccgcgctcatcttcttcgccatttggcacattatagcatttgatgagctgaagactgattacaagaatcctatagaccagtgtaataccctgaatccccttgtactcccagagtacctcatccacgctttcttctgtgtcatgtttctttgtgcagcagagtggcttacactgggtctcaatatgcccctcttggcatatcatatttggaggtatatgagtagaccagtgatgagtggcccaggactctatgaccctacaaccatcatgaatgcagatattctagcatattgtcagaaggaaggatggtgcaaattagctttttat

SEQ ID NO: 34616 - DNA, 417 bp, Homo sapiens
  misc_feature (1)...(417): n = A,T,C or G
ggaagggctgtcaaatagtgggaggactgcttgagctcaggagttcgggaccagcctgggtaacatggtgaaaccctgtctctaccaaaaaaaaaaaaaaaaaaaattggtttttatttacggggggggggggggggccccctggggccccacttttttggggggctggggaaaaaaaatcccttgacccaaaaaggggagggttccgggaacccttaattgcccccttgccttttacccgggggggggggggacccttccttttaaaaaaaaaaaaaaagggatttattttccttggggggggggggggttttttttccgggggcctttttaaaaagggccccatgataatattccctcttttattggaaaaaccacctttttttttttttggaaggggcccctcttcttcccaan

SEQ ID NO: 34617 - DNA, 469 bp, Homo sapiens
  misc_feature (1)...(469): n = A,T,C or G
tgggtgcnntgatttgataacattatgaccangcctacgccaagcttgggacgaggatcaacaactggtaacctaaccctgggcgggcatcatgctatatattgaagtacgcgaaactttctgcgtatgaattgctgatactttgcaaggcattttcaaatccatcaccttatgagagcttcacagctagtctgaggtagttacttcattggaggtaaaacttaaaacacaagaaagagcccacatgatttgcctagggtcattcagtaagtccgtgatggagctagaacttgttcttgtcagttttttgttctagtcttccctttcatggaggcaagaataaccattatgaaacagttagataatcataaaaatcagcatacaataaaagacttaaatgtcacaagaaaaattcaaaacctttagctaaaaaaaaaaaaaatcttttgattctttttccacaagcact

SEQ ID NO: 34618 - DNA, 453 bp, Homo sapiens
  misc_feature (1)...(453): n = A,T,C or G
nttgaaaacttgatgacatgatacgccagcttggcacgggaattgaattttaagcatctcctgaggatcagaaagtaatttcttctcaaagggtacttccactgatggaaacaaagtggaaggaaagatgctcaggtacagagaaggaatgtctttggtcctcttgccatctataggggccaaatatattctctttggtgtacaaaatggaattcattctggtctctctattaccactgaagatagaagaaaaaagaatgtcagaaaaacaataagagcgtttgcccaaatctgcctattgcagctgggagaagggggtcaaagcaaggatctttcacccacagaaagagagcactgaccccgatggcgatggactactgaagccctaactcagccaaccttacttacagcataagggagcgtagaatctgtgtagacgaagggggcatctgg

SEQ ID NO: 34619 - DNA, 498 bp, Homo sapiens
cccgcccctcccaggacaccgtttgttgtagatcactccagcttggcacgaggggagtgtccactttgcagcattttctgaaaatctcaaaaaaatccaataggcagcctttctaacaacatgataaattcagaatactatgcaagttcttttaaaaataattgctattcttatacaaattgctggttgggggggggggatatattttttcatatattttcatagggttcaaatggaagtggtaaggaaatctgaatagctaatgaaatagctgtgttttgtaaaaagaaatgtaaaagctattaaaatgctacattaaaatccacttgagatgcctaaaatgtactcagcagctctttgcatgttgtaattttcatatcaaaatgctttatttacattggaagagaaatttccattacaaaacaaaaactgacatgaacgattatttcaaaatagtattttgtagctaatttttaaaaacttggagcactattataa

SEQ ID NO: 34620 - DNA, 414 bp, Homo sapiens
  misc_feature (1)...(414): n = A,T,C or G
ggtgcagcgagtcacagaataacaaatgtatctcatgtgtgaaccctgaagacaaatgtaagttctcatgccgctatattttattgctgtgtaattttctttccggtttgaaatcatgcttggccaacatgtaatcatttcaatgagaatttccagggaggaaagttgtctgctaatctttacttaagacttttttgttttccttttattagctaagcaacattataggagctgaaattcctgacagcagctgtggcaattcagcctaagaatggctgagaactgtaacccaaagtacatccaattactatgggattaacactggatgtatttttaattgactttcttaatgtagaatgtgtacatccccactgtttctgattgcatgctattttaataatactgttgctaaan

SEQ ID NO: 34621 - DNA, 478 bp, Homo sapiens
  misc_feature (1)...(478): n = A,T,C or G
nccttgataacctgatgaccattaccacgncaagcttgggacgaggaagtcaccctcaagggcgccaaggactgtgtggaggcagccaagaaacgcattcaggagatcattgaggacctggaagctcaggtgacattagaatgtgctataccccagaaattccatcgatctgtcatgggccccaaaggttccagaatccagcagattactcgggatttcagtgttcaaattaaattcccagacagagaggagaacgcagttcacagtacagagccagttgtccaggagaatggggacgaagctggggaggggagagaggctaaagattgtgaccccggctctccaaggaggtgtgacatcatcatcatctctggccggaaagaaaagtgtgaggctgccaaggaagctctggaggcattggttcctgtcaccattgaagtagaggtgccctttgaccttcaccgttacgttattgggg

SEQ ID NO: 34622 - DNA, 436 bp, Homo sapiens
ggttgaagacagcatgcatccttccagcatcttccactcctttgaaatcagcatccctcatcttacttctccaggataaaaattaacatagctgttaccatatttgcaaaggccaaactttatttgatagatagatagatagatagatagatgtatttatgtataaaatatgtatggtgtgacaggtaggaattacgtattggaacaatgggaccatgggaccaaatatattaaatgggagcaactgcagcaaatctgagaggaatagtgtgcaggatacatacgctaaaagctacaagctaatctcttagttattgccccctacatgtaaaagtaagtgattggaaaggatttatctctaaaattggaaatgctacatgaaatattgtaaagtggaatcaatacgggtacatatgggcacaataatatcacatgg

SEQ ID NO: 34623 - DNA, 427 bp, Homo sapiens
gggtgaagatgcagccaccttctgggacagaactctctccatttagccccatccagccacctgcagccatcacccaggtcatgttgctggccaatccactgaaggagaaggtgcggcttccgtataagctgaccttcgccctgggggagcatctgatcacagaggtgggcgaagtggaccagttccctcctgtggaacagagggggaacctatgaccccagaggacgctgtgaactccaccttgaagccaggcaggctgccctgagacaaggagggctctggtcgacactctccatgccctgacaacagagcttgtagctttgatgtggaacaggggccctgggcatttctgctgagaaccaaactgctgctgtgataacctctcctttggcccctaaaaggacctgtttttatctacctgtgtgac

SEQ ID NO: 34624 - DNA, 499 bp, Homo sapiens
  misc_feature (1)...(499): n = A,T,C or G
agagggcncntcctttganaccgcttgttgtgattccgccaagcttggcacgaggatcagaatgattttattttttgtttttatgtacagacacattcttatttgtttaaaatgtaggaggttattatgatgaaaactttgaagaaattcttaaactttatcttcctctgtggattgaggagtaaaaatcacaattagagatgtttaaagaacttcttttaagaaataattcaaaaaaactactcatgtcattaagtaaaaaatataatacatattagaataattggtttgggtctgctatggcttaagtaggtattgtgaaccagtcccatctaaatatctgccacattaaaataattgaaaccccttttttggagatctctgtaggccatgaaatttctgtaagggtaataatagctaatatctcggggttcttactatatctggggcattaaattctaagaactttatattaacttaaatctcacagtaattctat

SEQ ID NO: 34625 - DNA, 436 bp, Homo sapiens
  misc_feature (1)...(436): n = A,T,C or G
ggcttagaaagcctctgtggtgcttaaggaccctgaaatatttgttgagccaacttggtcactataaacatagaatgaagttgacagagaaattgatggcattgaggtaagatgagtcatatattctagacctgagtgaagaaataagagctataagggaatctgatgaagaaaatggaaaggtcaagaagctggagattttcatgaatttgaagactaggcatagtgagtgagaagatatgtgtgaactcagggaataggaagttgaatttgtattcacaagaggaccagtttataaagaaacaaaagcataaaacagtatgctgttactggggaatagcaagaaggttgctgtaattttagagaaggatatttgggagaggtatggngctagaatgataataggttggactgcttcagatgagacatgtttgtn

SEQ ID NO: 34626 - DNA, 422 bp, Homo sapiens
gggtcgtggccggtgcctacatcaaactgtactgtgacctgccgcggggcgactttgaggccgtgtgggactgcgccatggtgaggcacgtggcctggctcatcttcgcagacgggctcctctactgtcccgtggccttcctcagctttgcctccatgctgggcctcttccctgtcacgcccgaggccgtcaagtctgtcctgctggtggtgctgcccctgcctgcctgcctcaacccactgctgtacctgctcttcaacccccacttccgggatgaccttcggcggcttcggccccgcgcaggggactcagggcccctatcctatgctgcggccggggagctggagaaaagctcctgtgattctacccaggccctggtagccttctctgatgtggatctcattctggaagcttctgaagct

SEQ ID NO: 34627 - DNA, 412 bp, Homo sapiens
ggtatattactaataaaacttaaccaacacttacaattcagtcattatagtaagtaaaaattagatgctacagctagctagactgtatccctagaaatgatgaataatttgccatttggacagttaacatccaggtgttacaaagtcagtgttaattctaaagatgatcatttctgccctttagaatggcttgtcccatcagcagatgaatgtgttaagcacaaagcatcttccttaaagcacaaagagagggactaactgatgctgcatctagaaaacacctttaagttgcctttcctctttgtagttagcgttcaggcaggtgacgtgtggaaagtctagggggttccattctggccatgcgagcccagctcctaccaacgtcggtaacttgagcagtccctgttgctgg

SEQ ID NO: 34628 - DNA, 411 bp, Homo sapiens
gggggaggccatgcgggaactgtcggaggttatagactctttgtacatagaagtgaagcagaacttcattgaccctgttcagaatcttcatgacaaagatcttaaggaaattcaacatcatctaaagaagttggagggtcgacgcctggattttgattataagaagaaacgacaaggcaagattccggatgaagagcttcgtcaagctctagagaaatttgatgagtctaaggaaattgctgagtcaagcatgttcaatctcttggagatggatattgaacaagtgagccagctctctgcacttgtgcaagctcagctggagtaccacaagcaggcagtccagatcctgcagcaagtcacggtcagactggaagaaagaataagacaggcttcatctcagcctataaggga

SEQ ID NO: 34629 - DNA, 409 bp, Homo sapiens
ggaaaatatttttgcaaccagaacacaaaagcaggctagtcagctaaggtaaatttcattttcaaacgagagggaaacatgggaagtaaaagattaggatgtgaaaggttgtcctaaacagaccaaggagactgttccctaatttattctcttggctgggtctctcattgaattatcagaccccaagaggagatattggaacaggctcccttcatgccaagggtctttctaagttaatactgtgagcattgagcccccattaaaactcttttttacttcagaaagaattttacaggttaaagggaaagaaatggtgggaaactctccccgtaatgcttagccaactttaaagtgtacccttcaatatccccattggcaactgcagctgagatcttagagaggaaatata

SEQ ID NO: 34630 - DNA, 475 bp, Homo sapiens
  misc_feature (1)...(475): n = A,T,C or G
ggcgggnnncnggctactatcccatcgattcccttgcanccnccttaccccaagctcgtgacgaggcaaatgtacacagcacataaaaataacaaaaaacttaaagcactctatgaacagtcacttcacatcaagtctgccatccctcatccactgattatgggagttatcagagaatgtggtggtaaaatgcacttgagggaaggggaatttgaaaaggcacacactgatttttttgaagccttcaagaattatgatgaatctggaagtccaagacgaaccacttgcttaaaatatttggtcttagcaaatatgcttatgaaatcgggaataaatccatttgactcacaggaggccaagccgtacaaaaatgatccagaaattttagcaatgacgaatttagtaagtgcctatcacaataatgacatcactgaatttgaaaagattctaaaaacaaatcacagcgacatcatgg

SEQ ID NO: 34631 - DNA, 459 bp, Homo sapiens
  misc_feature (1)...(459): n = A,T,C or G
ggcgccaatggggacttatagaantcgttgacgccaccctnggcacgagggcctatctcattcctttctttcgattacccgaggcgcggagagttaaggcggttgctgcggcatcaagggcggcggcggcggcggcggcagctgcagagacatgtccagcatgaatcccgaatatgattatttattcaagttacttctgattggcgactcaggggttggaaagtcttgccttcttcttaggtttgcagatgatacatatacagaaagctacatcagcacaattggtgtggatttcaaaataagaactatagagttagacgggaaaacaatcaagcttcaaatatgggacacagcaggccaggaaagatttcgaacaatcacctccagttattacagaggagcccatggcatcatagttgtgtatgatgtgacagatcaggagtccttcaataatgttan

SEQ ID NO: 34632 - DNA, 420 bp, Homo sapiens
ggccgaggactgagtttgtggctgcatttttatctctggtggctctgctacggcggcgcaaaaatgaggcaaaagcggaaagggtgaaaaccaagacagctgccaaatatggcctttctgcccagccccgcctggtggatatcattgctgccgtccctcctcagtatcgcaaggtcttgatgcccaagttaaaggcgaaacccatcagaactgctagtgggattgctgtcgtggctgtgatgtgcaaaccccacagatgtccacacatcagttttacaggaaatatatgtgtatactgccctggtggacctgattctgattttgagtattccacccagtcttacactggctatgagccaacctccatgagagctatccgtgccagatatgaccctttcctacagacaagacaccgaatag

SEQ ID NO: 34633 - DNA, 407 bp, Homo sapiens
gggttgttttccgaaatggaaattggcctataccaggagagcggattccagacgtggctgcattgtccatgggcttctctgtgaaagaagacctttcttggccaggactcgcagtgggtaacctgtttcatcgtcctcgggctaccgtcatggggatggtgaagggagtgaacaaactggctctacccccaggcagtgtcatttcgtaccctttggagaatgcagttccttttagtcttgacagtgttgcaaattccattcactccttattttctgaggaaactcctgttgttttgcagttggctcccagtgaggaaagagtgtatatggtagggaaggcaaactcagtgtttgaagacctttcagtcaccttgcgccagctccgtaatcgcctgtttcaagaaaac

SEQ ID NO: 34634 - DNA, 441 bp, Homo sapiens
  misc_feature (1)...(441): n = A,T,C or G
gacagttccgtttaggacctctnataaacccttgaaccacatacgccagcttggacgaggcccagctaccgagggccaaattcaacgcttttttgaccactttttaacatattataaaaaacgggcccattcttggaaagattgggcggaaatacatgatagcggaccaagtgccaccgaatgaaaaatcaccactgcaagctgactcaggtcttgaacactcactatgtgggccccaaaaggatcctcttgactgggaccccgctgcagaataagctccctgaactctgggccctccttaacttcctcctcccaacaatttttaagagctgcagcacatttgaacaatggttcaatgctccatttgccatgactggtgaaagggtgcacttatatgaagaagaaactatattgatcatcaggcgggtacataaggtgttn

SEQ ID NO: 34635 - DNA, 415 bp, Homo sapiens
gggcccgaggtcccgatgcttgtcagatactcaccagagccccgctgggccaggatcccccgcagaggacagtgctagggctgctaactgcaaatgggcagtacaggaggacctgtggccaggggatcacaagaatcaggtgttattctggatcagaaaatgccttccctccagctggaaagaaagcactccctgactgtggggtccaagagccccccaagcaagggtttgacatctacatggatgaactagagcagggggacagagacagctgctcggtcagagaggggatggcatttgaggatgtgtatgaagtagacaccggcacactcaagtcagacctgcacttcctgctggatttcaacacagtttcccctatgctggtagattcatctctcctctcccagtctgaaga

SEQ ID NO: 34636 - DNA, 441 bp, Homo sapiens
gggggtccttttgagaccgtcagtgaagacatatcgccaagcttggcacgagggtggaggtggattccgagtggtgacaggacgctgaccgtggtgcttaagccactgcctctccctctggtcccacaaatgggcgccccccctccccatgcaggtggtgtcgggcccttcttgctgccctgccccaagttgggggtcagtgctgcctgtccccatgcttaacatacccgcctagctgctggcacatttttcttggtttggccttttatttttttctaataacctaaaaactggcaaaatagttctgcaggttgaagccatgtctacatgaaagtcctcagtaagtgttagagggaacagggcggagatatccttatgccacccccgctggaggatgtgggcagcttatggccctggaggcggtgcggcaaggaagagggg

SEQ ID NO: 34637 - DNA, 421 bp, Homo sapiens
tatgaccacttcgaatagacgactatgccaagctcggcacgaggctggaagaggattccgaggggggacaggacggtgcccttttatacaaagtttttgcctgtacctctggggccacaaatgggggccccccctccccatgcagggggggacgggcccttcttgctgccctgccccaagttggggggcagtgctgtctgtccccatgcttaacatacccgcctagctgctgtcacatttttcttgtgtaagccttttatttttttctaataacctaaaaactggcaaaatagttctgcaggttgaagccatgactacatgaaagtcctcactaagtgttagagggaacagggcggagatatccttatgccacccccgctggaggatgagggcagattatggccctggaggcggcgcggca

SEQ ID NO: 34638 - DNA, 459 bp, Homo sapiens
cgcgcccaatagaaacagttgagaccctctattacgccaagcttggcacgagggccgggtgagtgatagagttggttggtgttgggccggaggaaagcgggaagactcatcggagcgtgtggatttgagccgccgcattttttaaccctagatctcgaaatgcatcgtgattcctgtccattggactgtaaggtttatgtaggcaatcttggaaacaatggcaacaagacggaattggaacgggcttttggctactatggaccactccgaagtgtgtgggttgctaaaaacccacccggctttgcttttgttgaatttgaagatccccgagatgcacctgatgcagtccgagagctagatggaagaacactatgtggctgccgtgtaagagtggaactgtcgaatggtgaaaaaagaagtagaaatcgtggcccacctccctcttggggtcgtcgcccg

SEQ ID NO: 34639 - DNA, 400 bp, Homo sapiens
  misc_feature (1)...(400): n = A,T,C or G
gggtaaagcgcttagtggtctgacatatactggaaatgtatgtatactggcgtactttatattctctaaaatgcttaatgcctttgaaattttgtaatcaaaaaaaagctttgaaaaaatctaaaggggagagtattctttaaagtttttaacataagcttgtcaatgcacatgtagatggttagcatgtttagcaaaccttgtgaaattataataagtttgtagttacatgtgaaactctaaatgcatggcaactgttaatgtcataacagcttagntattttgttctgttctgtcatgtgccacaaaatatgtacttttttcacttttttccctttgtatatcagntacgggttacaactggttcattctgaaaacaacaacaacaaaagtccattct

SEQ ID NO: 34640 - DNA, 381 bp, Homo sapiens
ggcatgataacacacgccggagggtcgcacgcgggttccagttttgattgctggagttgtgtattgccaggaggctctccgagattgggggcgggtcactgcctcatccaccggagcgatggcgtttctccgaagcatgtggggcgtgctgactgccctgggaaggtctggagcaaagctgtgcaccggctgtggaagtcgactgcgctcccccttcagttttgtgtatttaccgaggtgggtttcatctgtcttggcaaggtgtccaaagaaacctgtaagttcttaccttcgattttctaaagaacaactacccatatttaaagctcagaacccagatgcaaaaactacagaactaattagaagaattgcccagcggtg

SEQ ID NO: 34641 - DNA, 451 bp, Homo sapiens
  misc_feature (1)...(451): n = A,T,C or G
ggacgggncccgggccgctccttttgatnacatcatgaaatgcttacgccaagcttggcacgaggggatgaagatcgctgtgtataaatttccagagagatgctccttttcactgctgaataaatgggaaccagagctgcctcaggggacttaatgacaatttctcatcttcattgattgggtcagatttaattgctgactcagaggaaatatttgttcttaggagacttgctgcctatcaggaatgagttgaagagttctagccctgaggaaaagtttatgtgagctgaagaaaagatgctttagagagagagagagagagaatgggccttgttttcttttcttttttcaccctctctcataaagggagtagggcaatgttaagcaggtaaaccctaataccatctacaacctcgtattaccatagagtatatcttcgacaagtatatag

SEQ ID NO: 34642 - DNA, 401 bp, Homo sapiens
ggctgactgactacctcatgaagatcctcaccgagcgcggctacagcttcaccaccacggccgagcgggaaatcgtgcgtgacattaaggagaagctgtgctacgtcgccctggacttcgagcaagagatggccacggctgcttccagctcctccctggagaagagctacgagctgcctgacggccaggtcatcaccattggcaatgagcggttccgctgccctgaggcactcttccagccttccttcctgggcatggagtcctgtggcatccacgaaactaccttcaactccatcatgaagtgtgacgtggacatccgcaaagacctgtacgccaacacagtgctgtctggcggcaccaccatgtaccctggcattgccgacaggatgcagaaggagatc

SEQ ID NO: 34643 - DNA, 445 bp, Homo sapiens
  misc_feature (1)...(445): n = A,T,C or G
ntttctttgatnacagtcttgaccttagatancccctgcttggcacgaggcacttacttaaccatccctgtttcaagagtgtaggtggtcaccctgtctctgccgctgacctggcctggaccctcggctgtgaaagggaggggtgggctgggctggaggaacctgaagccctcgtgatgtcacaagcccatctggctgggcatcccctgctgtgtcctgagctgcacatgccccaggtggcccccacagcagaggcgagccactggagggtggagggcttccacgggacggtcttcaaggggagaaggaagggcccaggcccccaggagactcaggagaccagagcctggggtcaggggctcatccaggggctcatccagggctggatgtccggagccagccccgcagccctgtgttctttgttcttcgcactcccaccgtccgt

SEQ ID NO: 34644 - DNA, 415 bp, Homo sapiens
ggggaaaatagggcctagaaacagggaacttaaggccactctgtgctaacttcctaaaagagaaaacaccagggtctggaggcaggaaatctaaggccaattcactctgacttcccaaagctggatcaaaaggaaaataccggggtctgggggcaggaaacctaaggctgattaacacaaacttcctaaagctaaaccaaaagacaaaaaccccatctctccatgctgagtaacaaaggatcagaggctactctccctacaaccatccctcttccaccacatctcaaatggaaagggaggggagggtgccttgttgaccatgggccaagcagggaccatcccttcatctgcatagggtgccagttcacctcagcctttaattagccacagaccaaatccttcatccagataaggg

SEQ ID NO: 34645 - DNA, 389 bp, Homo sapiens
ggacttctgttaggttatatattatagcattagtgatctaagattaccacaaaagcttggcaagtccaagaaatgccttcatgtatgttattacataaacagatgttcaaagaggagggtttttcaaatttgttttaatatgacactatccaaattaagaaatatgactggtctttgttgattttgctaaaatagttattaaccttgatgatattaatctcatgtgtacttggcacagtattaacacatagtctatctagttacagcccagtttcattaattttaattatagcagaataaacagtgtcaatccaagacccgaatgtccattccaaatcaccttaagcttcctgagttatttgtttggtttggtttttttccaccttaaa

SEQ ID NO: 34646 - DNA, 443 bp, Homo sapiens
attgaaaacagttgtgaccaatttgacgccctgcttggcaccagggccctatgagcctttaatgccctggttttgccctgcccctctgacccctgcctccttcaggtatgcacctggccctcaccactgtgctcctgtgggcatgggggagtctccaggcctttgaaattgtggagaaggaaaacatttttcagaggaccccctgccctgctttcctgatgtttgaaaatgcagcctacctggccgacatgagctttgagcttccctgtcactgcaaacccgaagaggtgccagctgtagtctggttctaccaaaagcacctaggtagcagccacaccaaagtgctgacggactttgatgggcgggtgctgacggaggcagcccaggtacgtgtgggcagcgacatgctgatccgcttcagcatccgcatgttcagcttgttg

SEQ ID NO: 34647 - DNA, 435 bp, Homo sapiens
  misc_feature (1)...(435): n = A,T,C or G
gggcgctcttttagctaagcccagaacttctcttttgacaataaagtactgagcagtggtatcatgagggccacctccacattgtcccctgcagaataaatgcggatgacagaaagcttatgctgtctaccactgaacagtgatggagatggtgctaagtttttacagttgtcttagccccagtggttctcaaggtggggctcctggcccagcagcagcaacttgtttgttagaatgcagacgcgcaggccccacctggcctcctgaatcaaaatggtgtgcggcagggtgcagcgagctgttttcacgaggcctccaggtgactggatgtaagcttgcttgagaactatgggttttagctattctggtgtctccctgattttctacagcgccaggatcctagtttggtgagggtttaaatttaatcttattttn

SEQ ID NO: 34648 - DNA, 439 bp, Homo sapiens
gggtgaattaagctggcgggcgggcggccaggcctgtagtctcagcacttcgggaggctcagcacttcgggaggctgtggcgggcggatcacctgagcctgggagttggagaccagcctgcgcaacgtagcaagaccctatctctaaaacagattcattaatacttagccaggcgcggtggctgaggtcccagctactcggcaggcccaggctggcctgagccagaccgctctggactgttttaattttttcagccttaatacctgccagaattttttttttactatgtatctttggccttacgtatataaattttatgtacaattgagattatcctgtatttgcttttcccccctcacttttatatggggacttttctcatgttaggctgaatactaacattttggaaactgtcggcctgaaaacgagcggagacaca

SEQ ID NO: 34649 - DNA, 439 bp, Homo sapiens
  misc_feature (1)...(439): n = A,T,C or G
tacgaggctggaagaattcgcgggcgaaggtgcctacatggtatactttgtgagcttcctggggacactggcagtgcttcctgggaatatcgtgtctgccctgctcatggacaagatcggcaggctcagaatgcttgctggctccagcgtgatgtcctgtgtctcctgcttcttcctgtcttttgggaacagtgagtcggccatgatcgctctgctctgcctttttggcggggtcagcattgcatcctggaatgcgctggacgtgttgactgttgaactctacccctcagacaagaggaccacagcttttggcttcctgaatgccctgtgtaagctggcagctgtgctggggatcancatcttcacatccttcgtgggaattaccaaggctgcacccatcctctttgcctcagctgcccttgcccttggcagctctctg

SEQ ID NO: 34650 - DNA, 491 bp, Homo sapiens
  misc_feature (1)...(491): n = A,T,C or G
cgggcccgggcattganacccctnnaattgagaacgcttgacctgattacgccagcttggcacgaggggagcataggaacagaaataaatgaaggtcattccctgcagagaagaaccaaaaccacagagaatgaagaactaggttttagaataggagcatctaaaaatagtttgtacaggtgcagagaggctgcctttttgctcatgatgacaagaaacatcagaacctcaaaacagggcttagaggagccacctttccccacaaaaaaaggtgtggattgtacctctctttcctttaaagaaccccaggattggttaatggttctgtgggatatgggggcctaagtcctggcccagaatttattgaagtgtttgggggaacctgtaatcaatacgattttattcttaggaacattttcagcaggacacggtggctcagacttgtaatcccagcactttaggaggcggaggtgggtggattgcttgagccn

SEQ ID NO: 34651 - DNA, 436 bp, Homo sapiens
gggccggctcctggaccttctggaatctgcaactccctccacctcatccttttcccttaaaggcctacctcccttctgggatctcttcccaaccttggccttgcatcgagcagcctcccaggtgtttaggggaagtaaactgatctgtcaggcactgaatgggacagaagtggcccttgggtgttctgaaagtttcctcgtgtccaaggcaggcctttctctgcctgtgggccagggagggcactgactctatctcctcttttcagacagcggtggcctacccgagcgcagtgtgtccttgacaggagccccagaatctgtccagaaagccaagatgatgctggatgacattgtgtctcggggtcgtgggggccccccaggacagttccacgacaacgccaacgggggccagaacggcaccgtgcaggagatcatg

SEQ ID NO: 34652 - DNA, 427 bp, Homo sapiens
  misc_feature (1)...(427): n = A,T,C or G
gggcgtgttggtcagcctggtctcagactcctgacctcaggtgatctgcccgcctcggcctcccaaagtgctggggttgcaggtgtgagccaccgcgcccagcctacacctgctcttaattgtgttttgacatgctgggtactacaacattacataaaacataaccatggaaaaagaagtgagtactttacaatcttcaatgatatgtgatacaagaaaacttcattcttctgcagcaattgtccaccaaatacgtaaaaccatgaaatattaagtgagctcttacaaaataactgaaagtatttgcattcaaaaatgaaaatgcgtccataagacttttatgcttcattactaaaaaaatcattaataataaaataaataatgacagacagttactaatgcaataaagttgctaaaatgagatggn

SEQ ID NO: 34653 - DNA, 420 bp, Homo sapiens
  misc_feature (1)...(420): n = A,T,C or G
ggttgaggacctggaacctcaggggacattagaatgtgctataccccagaaattccatcgatctgtcatgggccccaaaggttccagaatccagcacattactcgggatttcagtgttcaaattaaattcccagacagagaggagaacgcagttcacagtacaaagccagttgtccaggagaatggggacaaagctggggaggggagagaggctaaagattgggaccccggctctccaaggaggtgtgacattatcatcatatctggccggaaagaaaaatgtgaggctgccaaagaagctctggaggcattggttcctgtcaccattgaagtataggtgccctttgaccttcaccgttacgttattgggcacaaaggaagtgggatccgcaccatgatggatgagtttgaggtgaacan

SEQ ID NO: 34654 - DNA, 443 bp, Homo sapiens
  misc_feature (1)...(443): n = A,T,C or G
gggggctcccaattgagnacagtcatgagactgcttacgccaagcttggaacgaggtatgtgtaaaatgaaggggctggacagagtgatgagtgttctacctgggatggaggccctgggaggtggagaccatggctgtcttgtagtaggcatgtcttaggtatttactgaatggcccgttctggtcctcccaccagcctcttagcagccttttctgcatctcttctaacttcgtgtagatgcctgggcctttgtaactattctctcaactcaccattcatctttcttggagacgttaaaactatccactggattcaatacaactctgctttccactaaaaattctttaaaatgtccctcaacctttttcgtactgtaaccatatgggaggtgatacagtgcctttcctttgtgattaaggtcacggtagtcacttggaaggat

SEQ ID NO: 34655 - DNA, 436 bp, Homo sapiens
ggatggtaattcacagtaatgctgccgttgttcgggacttaaagacacttgacctgtttgggctgttgccacttaaaagttcatgaccacaaatgtccacagtgtcttcctctgaggaaactcgaatcctgaaatggaaattctttgtggcagataactggcttatgacaccttgaaaagttcaagtgctcatataacacaccacactgaaccccctttcctacagcaatatgttcactatgttaccaatttgcaacttgtgcttcaatagtggaatctactttcattgttaacactgagctaaagaaaaaaagccgtgtgttttatgaatgaccttatctgtttcctggataatacctttaagaataatgtcctgagtcaggcgtggtggtgcgtgcatctagtcccaactatttgggaggctgaggcaggagga

SEQ ID NO: 34656 - DNA, 482 bp, Homo sapiens
  misc_feature (1)...(482): n = A,T,C or G
nattgagaaccccttgaatatgatcacgcctagcttggcacgaggtggcacgagggtatgattataccatgagagacaggattaatatagaagatggcaaggcaaatttctaattagagggaatattaattttctacaaaataaagtttgttcatcaatacaaacctgctttcaaatcaaatcagaaagacatccttcggaatgtgttcagaacccaaacatcatgtcaatggcaacagaacagtcgaacctttcccagagggaacacagatggctgtatttggaatgggatgtttctggggagctgaaaggaaattctgggtcttgaaaggagtgtattcaactcaagttggttttgcaggaggctatacttcaaatcctacttataaagaagtctgctcagaaaaaactggccatgcagaagtcgtccgagtggtgtaccagccagaacacatgagttttgaggaactgctcaaggtctt

SEQ ID NO: 34657 - DNA, 476 bp, Homo sapiens
  misc_feature (1)...(476): n = A,T,C or G
aggcgcgggtggctcgctattgatactctatagattctcantagcgccagcttggcacgaggccccctgccacaatccttaacccccatatctggctgtccttgggtaacagctcccagcaggccctaagtctggcttcagcacagaggcgtgcactgccagggaggtgggcattcatggggtaccttgtgcccaggtgctgcccactcctgatgcccattggtcaccagatatctctgagggccaagctatgcccaggaatgtgtcagagtcacctccataatggtcagtacagagaagagaaaagctgctttgggaccacatggtcagtaggcacactgccccctgccacccctccccagtcaccagttctcctctggactggccacacccaccccattcctggactcctcccacctctcacccctgtgtcggaggaacaggccttgggctgtttccgtgtgaccaggggaatt

SEQ ID NO: 34658 - DNA, 407 bp, Homo sapiens
ggcacattgcttgatctaatccagaccaaagtgaattatgtggtccaagaagcaattgttgtcatcagggacatcttccgcaaataccccaacaagtatgaaagtatcatcgccactctgtgtgagaacttaaactcgctggatgagccagatgctcgagcagctatgatttggattgtgggagaatatgctgaaagaattgacaatgcagatgagttactagaaagcttcctggagggttttcacgatgaaagcacccaggtgcagctcactctgcttactgccatagtgaagctgtttctcaagaaaccatcagaaacacaggagctagtccagcaggtcttgagtttggcaacacaggattctgataatcctgaccttcgagaccggggctatatttattggcg

SEQ ID NO: 34659 - DNA, 423 bp, Homo sapiens
ggaaaaaactcaagaataaactgggacagaggatttcttccagagtgctacatggcaaaagagccttcaggaacgtgtgccggggtgtcatgatactccgaaggtgtcagtaattttggtcagcccacagtgagcacggcagcctcaagggagagccccttacatccttttctgggcgcctctgtctaattaagttcaaacatacaagcctgattctaggattaagggataagttagttctgaacagaaaaatataaggcagtttacatacccaatgaattcttgaagaaggaacctatagcccccagaccgataataaataattactgcctgccaaaatcctgaacaaagggaagcatgggggctccaaaattaatagtctcctgagaatacttatgagaccttgattttgtcacaaggttg

SEQ ID NO: 34660 - DNA, 493 bp, Homo sapiens
  misc_feature (1)...(493): n = A,T,C or G
attgaaaccgtttgacctgatgaagcacatcttggcacgaggctgaattaattctgtgcaggaaaggccaggaaattgcatgtgaagttcggtgcagtcaccacctctgtgtgacctgagctgcagtctcttcgctgagatgcaggttttaaatgagacttggggggctgagggcaggcctcaggcctcccagcgccccaacccctccttggtctaatgaaatgcagttcttagtgcagagatgttttaaggggcaatatatctcttcctttcccgaggttttagagccaagctcaaggtagtaggacgtagggtcttattttgttttcaaacccccatcctcagagcgcaaatacatgcagaggcttctgccaggataccacggggccttagtgggaacaggtggagaccagcactttccttntctgctgctgaggtanggattggggggtcagaacccactcacttttgcctgttaaaagtgccctcctgn

SEQ ID NO: 34661 - DNA, 445 bp, Homo sapiens
ggggacccagggcctttggcttccccagctcatccttggcccttccgctccaccagcctggtctgaggcgtgctctgtccttagagaaggcgcggtggccgggttcccttcccctagggcacattactaagggggtcaggcactgcatgctcgttccagcaccatctgggactgggtacagtacctccagccccagggccctgacctgcgcacctagcttgacatctcacgcacctcccagagctggcgccactgagtaatccggacctcaccacctcttttcctttgagcccaaggcagagctggagctggcgccacccagacagcgtcaggtgtggctggggtaggtttggaggtctgccagttacgccaagtcccctctgagattcgatcaggggactggatagattctttcaggtactcaatcaggaagcttgaggtgttg

SEQ ID NO: 34662 - DNA, 455 bp, Homo sapiens
  misc_feature (1)...(455): n = A,T,C or G
ggctctgcctcgcgaccccacgtgttgagccacaaagagtctcttgtattgatggccggacacactcgtttccgcagtggctgctttcctggaagacgtttcctttcttctgtattaatgaagcctggtaaaattaacacctgtctgaaaatcaaaaacatggcttcccagcagctctcctgtctccacagccgcgttttttaaccccgacctctcagcgtctgaatgaacagcgctcccacctccagtcctggcatccgctgggggcgctgttctttagctagtgccagtattaaaacattgtcattacgagagtgccaaatgacatcttccctccaccctgcccctgaaaaacagtacacacacatccgttcaacacaagacagggcaagtgtttttcttcctaaaaaaagttctttcttttattattttcacctattggctgctgcattttn

SEQ ID NO: 34663 - DNA, 446 bp, Homo sapiens
  misc_feature (1)...(446): n = A,T,C or G
gggcggatcctgttcatctacgccaagctcaaccctggtatcgcttatgtgcaaggcatgaatgaaatcgtggggcccctctactacacctttgccaccgaccccaatagtgagtggaaagagcacgccgaggcagacacctttttctgcttcaccaacctcatggccgagatccgggacaactttatcaagagcctggatgactcgcagtgtggcatcacctacaagatggagaaggtttactccaccttgaaagataaggatgtggagctctacctgaaactgcaagagcagaacatcaagcctcagttctttgccttccgctggctgacactgctgctgtcccaggagttcttgctgcctgacgtcatccgcatctgggactccctcttcgccgatgacaaccgctttgacttactcctcctcgtctgctgcgccatgctcan

SEQ ID NO: 34664 - DNA, 457 bp, Homo sapiens
ggaatctgagcaggacggaatctccaaaacgcataagctgctgcggtggacttgttccagcacagtcaagactgatgatgtgtgtgtgacaaagtcacacaggacctttggccgctccttgtccagcgatcccagggcggagcaggctatgacagcaattaaatcgcacaaacttttgaaccgtccttgccctgcagctgttaagtcagaggaatgcctaactctaaagtcgcatagactattgactcgatcttgttctggagatccacgatgtgagcacaacacaaacttgaagccccataaactgttaagcagggcttactctagtaatctcagaatggaagaattatatggactgaaaaatcacaaattgctcagcaagtcctactccagtgcccccaaggcatccaaaactgagcttttctaggaacctaacgcagaaggcaggaagctcttt

SEQ ID NO: 34665 - DNA, 429 bp, Homo sapiens
gggttaattccaaattaagtatcaagaagactttaccatcaatgttgatcttaagtggtttgactgcaggcatgcttatgaccgatgctggaaggaagctgtatgtgaacacctggatatatggaaccctacttggctgcctgtgggttactattaaagcatagacaagtagctgtctccagacagtgggatgtgctacattgtctatttttggcggctgcacatgacatcaaattgtgttcctgaatttattaaggagtgtaaataaagccttgttgattgaagattggataatagaatttgtgacgaaagctgatatgcaatggtcttgggcaaacatacctggttgtacaactttagcatcggggctgctggaagggtaaaagctaaaaggagcttctcctgctctggccatttactatgaactag

SEQ ID NO: 34666 - DNA, 406 bp, Homo sapiens
ggggctgccaataactatgcccgagggcactacaccattggcaaggagatcattgacctcgtgttggaccgaattcgcaagctggccgaccagtgcacgggtctccagggcttcttggttttccacagctttggtgggggaactggttctgggttcacctcgctgctcatggaacgtctcttagttgattatggcaagaagtccaagctggagttctctatttacccggcgccccaggtttccacagctgtagttgagccctacaatttcattcttaccacccacaccaccctggagcactctgattgtgccttcatggtagacaatgaggccatctatgacatctgtcgtagaaacctcgatattgagcgtgcaacctatactaacctgaataggttaataggcg

SEQ ID NO: 34667 - DNA, 411 bp, Homo sapiens
ggggctgtgcaggctcgcggcggcgcttttcggattccgagggctgctgggcctttgcaacaacttctcttatgtggtgatgctgagtgccgcccacgacatccttagccacaagaggacatcgggaaaccagagccatgtggacccaggcccaacgccgatcccccacaacagctcatcacgatttgactgcaactctgtctctacgggtgctgtgctcctggcggacatcctccccacactcgtcatcaaattggtggctcctcttggccttcacctgctggcctacagcccccgggttctcgtcagtgggatttgtgctgctggaagcttcgtcctggttgccttttctcattctgtggggaccagcctgtgtggtgtggtcttcgctagcatctcatcaggccttga

SEQ ID NO: 34668 - DNA, 434 bp, Homo sapiens
  misc_feature (1)...(434): n = A,T,C or G
ggtgggnccngncctgannacctgatgaacatcattaaccccgacttcgcccaacgtggcgcgaggataaaatcaaggacatacttctccttttagccttttaaaaattcaaaaacgtttagtccaagggaactttttatgctatcaggaaaggtttttgctgcttttgattctgattatcacagccaagcactttgctttatttctccctaattaataactacattccatgaggcctcttccaaccaaagaggccttttcttccaggagagtcccgcaggagatgctggtatgatgggcaccattggttaactaaactacatgcaggaagaagtccttggggccagactgccaggtgagtcctggttttggatgaagagttaatgagatattgggccaggctcaatgctgtagatttaatgctaagaggctac

SEQ ID NO: 34669 - DNA, 392 bp, Homo sapiens
gggttcatttgtaaatgctcataacagattttgctttttaaaaatgctgggtacatgaataattggtggaccagggattggttttctgaaggcagggtagggaacatgaatattccagatgagatactgacattatgcctaagggtcataatgtataactagcttcctaagaaaccctttgtgtattttttcagaatggagagggggctgagcatgcttgtgctgaaagaagccatatgccgaaaggacagaatctatcccccactcccttgccccataaccatacataagctagctagccttggctaatacatgggatttagtataggtgaagatacccctcatattcaaggacataatctctgtctggaataaattagcaaagcagaaag

SEQ ID NO: 34670 - DNA, 391 bp, Homo sapiens
ggctgcctagttccaccctccccagtccgtgctctttgctttcaatcctagctaagcatattttaatgtactttggtccctagtctgtgaggaggattttgcttttcccatatttgggacaatttccttaggaaagattcattcatgtcttcaatcaacagatgtttgctgggcgtctctgaggtgggatacagagtccagtcttcgagccttccccacttttgtcgtgtttttttccgagggtgacataatccttgcaggttttgtttttgttgtttttgagacagagtctcactctgtcgccaggctggagtgcaatggcgcaatctcggctcactgcaagctccgcctcccaggctcaagtgattctcctgcctcagcctgccgagta

SEQ ID NO: 34671 - DNA, 416 bp, Homo sapiens
ggcagagtgggagctcctgggagcctgtggccttggctttaagcaggtgggacagtgagcccagctggaagtggtcccgggctttgaaggatgactccaagactggagctggtttgggtgccaggaagagcttcttggcatggcggctgagggccccaccctgctcggaagggaccatgagctgccgggtgaagcgcgcccggtcgcgaatatcataggtctgggcatatttggccagactcagcacatactgggtcaacagcttggtctgtttagagttggtcaagtagagcttggctgccaagttgatgacctgcagcttgacaatatcctcctctgctgtgaatgacttggccatttttcttaagacatcaggtgcaatcctggggacatgctcacagtactctccgatgacg

SEQ ID NO: 34672 - DNA, 412 bp, Homo sapiens
gggccgtcgctcaagtctgtaatcccagcactttgggaggccaaggagggctgatcacctgatgtcaggagttcgagaccagcctggccaacatggcgaaaccccatctctactaaaaatacaaaaattagctgggcatggtggtgggtgcctgtaatcccagctaatagggaagctgaggcaggagaattgcttgaacccaggaagcggagattgcagggagctgagatggtgccactgcactccagcctgggcaacagagagaggctccatctcaaaaaaaaaaacacctaaaaaccaaaaaacaggctttctgaggaagtgccagagctccaagttctgacctcaaacatgggcagtttaacaaatgtgagctcaaatcctgcctctgtccttttgcacaggtgacctg

SEQ ID NO: 34673 - DNA, 406 bp, Homo sapiens
gggcaagggcaaagaggcagcaagagatttgtcctggggatccagaaacccatgataccctactgaacaccgaatcccctggaagcccacagagacagagacagcaagagaagcagagataaatacactcacgccaggagctcgctcgctctctctctctctctctcactcctccctccctctctctctgcctgtcctagtcctctagtcctcaaattcccagtcccctgcaccccttcctgggacactatgttgttctccgccctcctgctggaggtgatttggatcctggctgcagatgggggtcaacactggacgtatgagggcccacatggtcaggaccattggccagcctcttaccctgagtgtggaaacaatgcccagtcgcccatcgatattcagacag

SEQ ID NO: 34674 - DNA, 444 bp, Homo sapiens
  misc_feature (1)...(444): n = A,T,C or G
nnnctgaccgtcactgctcggacancanannnnaagnnttggacgaggccatgaaatgaaggaggctctgagacccctgcaagcagaggcccggcagctccgcctgcaaaacaggaacctgggggaccagatcgcacttgtgaggcaaaaacgagatgaagaggtgcagcagtacagggaacagctggaggaaatggaagaacgccagaggcagttaagaaatggggtgcaactccagcaacagaagaacaaagagatggaacagctaaggctcagtcttgctgaagagctctctacttataaggctatgctactacccaagagcctggaacaggctgatgctcccacttctcaggcaggtggaatggagacacagtctcaaggggctgtttagaaatatatggccaaatctgtaacccggaaacagcaaaaaacttcttatct

SEQ ID NO: 34675 - DNA, 447 bp, Homo sapiens
  misc_feature (1)...(447): n = A,T,C or G
naaaaacttaggacaatcgtaganacannacnccaagcttggcacgagggaaccttctaggggaagctcccactcaaaagtgcaccgaagccacagccatacacaggaccggaggtccaggaatgagagatccaacaaagccaaggagagatccaggtcgatggataactccaaaggccctctgggtgcttcttctctagggacgccggaagaccttgctgaaggctgcagccaagacgaccagacccccagccaatcctacattgacgacagtactttaaggcctgcacagaccgttagtctccaaagggctcacatttcgtccacaagctataaagaggtgtgtattccagagatagtcagtggcagcaaggaaccgtccagcgcttgcagccttttggagccaggaaaaccacccgagagtttgccatcctatggcgaactcaa

SEQ ID NO: 34676 - DNA, 458 bp, Homo sapiens
  misc_feature (1)...(458): n = A,T,C or G
cgaaagcgacccagagnnnttttgcttaaacagtaggaccagcanannnnaagnttnggacgaggcccatcctctactgtgagatactgctatttttttcgttgttgaaactgtattctctggaaatcatagataagatcagggagggaatctgtgtcactatcctggctgtgatactgtactgcagttttgtttttcttttttttgagacggagtctttctctgtcacccaggctggagtgcagtggcaaaatctcagctcactgcaacctccgccttctgggttcaggcgattctcctgcctcagcctcctgagtagcggggattacaggctcccaccaccatagccagctaatttttgtatttttagtggagacggggtttcaccatgttggccaggctggtgtcgaatttgtgatctgcctgccttggcctccaaaagtgctgggattacaggc

SEQ ID NO: 34677 - DNA, 446 bp, Homo sapiens
  misc_feature (1)...(446): n = A,T,C or G
ntaaacccgtttgatctagtacgaagcnnacnnnanagcttggacgaggaaatttttaacaaaggtcttacgatttacacatttatatttaaacattgatatatagagtattgattgattgctcataaggtaaaatgggaaagttagagacaactattctaacacctcaccattgaaatttatatgccaccttgtctttcataaaagctgaaaattggtacctaaaaagaaaatcaacttcatgttttgaagatagatataaatattgttctttgttacaatttcgggcaccgcatattaaaacgtaactttattgttccaatatgtaacatggagggccaggtcataaataatgacattataatgggcttttgcactggtattatttttcctttggaatgagaaggtctgaatgagggttctgattttgaatggtccaatgtttg

SEQ ID NO: 34678 - DNA, 445 bp, Homo sapiens
  misc_feature (1)...(445): n = A,T,C or G
nttctgaacgacattgctaggaccanccnnannnnaagntnnggacgagggggactttgagatgtgtgaatattcatcagcatttgcttgtggaacgctcacctctgctttttactcttgccgaaagactgtattgatcaagtgatgaaactacagaatctgtttgtagatgattcaggtcgatatttggctattcaattccatctggaatgggcatatgtgtttttatattattatgagtacagaaaagcaaaagatcagttggatattgctaaggacatcagccaattacaaattgatttgacaggtgctttgggaaaaagaacacggttccaggaaaattatgtggcacaactgattctagatgtaagaagggaaggggatgtcctttcaaattgtgaattcactccagcacccactcctcaggaacatttaaccaagaatc

SEQ ID NO: 34679 - DNA, 443 bp, Homo sapiens
  misc_feature (1)...(443): n = A,T,C or G
nnccctacgacatcgtaggaccancannacgccaagcttggcacgaggtcctagactggattgtagagaaaactgtaaatgttttaacacactagtgtttctactgccaaattcctgttatctcattaattgcattccatatacaccttttgcaaatgtttaccatatagtctgtgtttcccaaactttgggtatttgaccatgtgatcccttttaatatgtttgagaaatgcagaatttgtccttaaatatttattccagatatgaagtaaatcagcatgattctataaccagtagcaaatataaaagcaatcattcctaaataggatcaaattgcctccaacttagaaccatataaaatataaggtctatttcaacattaggtttccagcccacagcttcctgtgcttttttttgagacagagcctcgctttgtcgccagg

SEQ ID NO: 34680 - DNA, 403 bp, Homo sapiens
gatttcactggccatgccctggcgctctaccgcactgatgactacctggaccagccctgccttgagaccgtcaaccgcatcaagttgtacagtgagtccctggcccggtatggcaagagcccatatttatacccgctctacggcttgggcgagctgccccagggttttgcaagattgagtgccatctatggggggacatatatgctgaacaaacctgtggatgacatcatcatggagaacggcaaggtggtgggcgtgaagtctgagggagaggtggcccgctgcaagcagctgatctgtgaccccagctacatcccggaccgtgtgcggaaggctggccaggttatccgcatcatctgtatccttagccaccccatcaagaacaccaacgacgccaactccg

SEQ ID NO: 34681 - DNA, 384 bp, Homo sapiens
  misc_feature (1)...(384): n = A,T,C or G
aanaattttttatgacacatatatttatatataaacatataggatatattgggacatcgttgagaggttatatgggcagaagtttttttctttctcaagataaaaaatattttttgccatatgtaattttgtgttgcaggctgtcgagagataaaaatgattttaaatctgtgtactgatgattctttcggtgttaagaaacacaggggtgtgcacttccctttttatgggcttatggattctatttatattaagacctgtttataattgttttctgccaaagggaattgtctaacttcagatttctacattgggttcatacttactgttttatatcagaaataaaaaaatagcttctgctttttcatatgaaatcttggtacg

SEQ ID NO: 34682 - DNA, 447 bp, Homo sapiens
  misc_feature (1)...(447): n = A,T,C or G
ttaatacctaggtatcagtataaacnnccnnnnagnnttggacgagggaggngcccatgccttcctcggcccctcctattatggccccccgtccaccccccatgattgggccaacagcctttgggcctgctccacctgtggcacctgtcccagctccagccccaatgccccctgtgcatcccccacctcccatggaagatgagcccacctcccaaaaactgaagacagaggacagcctcatgccagaggaggagttcctgcgcaaaaacaagggtccagtgtccatcaaagtccaggtgcccaacatgcaggataagacggaatggaaactgaatgggcaggtgctggtcttcaccctcccactcacggaccaggtctctgtcattaaggtgaagattcatgaagccacaggcatgcctgcaaggaaacagaagctactgtatgagn

SEQ ID NO: 34683 - DNA, 373 bp, Homo sapiens
  misc_feature (1)...(373): n = A,T,C or G
atgctganactcacctggtgcaaccctcccttctgaatcgaagttcaagtcccgcggacactgcaaccatgaaggagagacgggccccccagccagtcgtggccagatgtaagctcgttctggtcggggacgtgcagtgtgggaagaccgcgatgttgcaagtgttagcgaaggattgctattcagagacctatgtgcccaccgtgttcgaaaattacacagcctgtttggagacataggaacagagggtggagcttagtctctgggatacctcaggatctccctactacgataatgtgcgtccactctgctacagcgactcggatgcagaattactatgttttgacatcagccgtccagagacagaggacag

SEQ ID NO: 34684 - DNA, 436 bp, Homo sapiens
  misc_feature (1)...(436): n = A,T,C or G
cagcccctacatcacccgctactttggctcctacctaaagagcaccaagctatggatcatcatggagtacctgggcggcggctcagcactggacttgcttaaaccaggtcccctggaggagacatacattgccacgatcctgcgggagattctgaagggcctggattatctgcactccgaacgcaagatccaccgagacatcaaagctgccaacgtgctactctcggagcagggtgacgtgaagctggcggactttggggtagcagggcagctcacagacacgcagattaagaggaacacattcgtgggcacccccttctggatggcacctgaggtcatcaagcagtcggcctacgacttcaaggctgacatctggtccctggggatcacagccatcgagctggccaagggggagcctccaaactctgacctcccn

SEQ ID NO: 34685 - DNA, 447 bp, Homo sapiens
  misc_feature (1)...(447): n = A,T,C or G
ataaatcctagcttggtcggtagaagcnnccnnnnagnnttggacgagggttgtctacagcaatactatacagtccatcattgcaatcataatagccatgggacggctaaagattgactttggggaagctgccagggcagatgatgcccggcaattatttgttttagctggcagtgctgaagaaggagtcatgactccagaactagcaggagtgattaaacggttatggcgagatggtggggtacaagcttgcttcagcagatccagggaatatcagctcaatgattctgcttcatattatctaaatgatctggatagaatatcccagtctaactacattccaactcagcaagatgttcttcggacgagagtgaagaccacaggcattgtagaaacacatttcaccttcaaagacctatacttcaagatgtttgatgtaggtggccg

SEQ ID NO: 34686 - DNA, 483 bp, Homo sapiens
  misc_feature (1)...(483): n = A,T,C or G
ggtggggccncccnntttgaaatcgatatcactctgcaaacgccaagctnggcacgagggtggaaatccagatttcctcttgaggaaaagtcctacgaatcacttcagaatggactttgcagtcctcattaacacatggacaaagagcagacaactactacgttgcaagggattcaactagtcactgttgtgaaatgtcatatccatgttgatgacagccctggcgcctgctcaactccccctctagagttttgcgggtacttccgtaggatgaatttcagcactgcaggaacatctgagggggctaaaatattttcatgcaaggttccaaacccataaactattttgctatcaattaaaacaaaaatattaattaaaaacaataaaaaggacagcagggttagttttgttaagcttccacaagtattcgttgtgacgatgttcctctgaaacaggctcgttttctcaggtctttctacactt

SEQ ID NO: 34687 - DNA, 434 bp, Homo sapiens
ggggcaggtgtcctctgcatggaagaatcatactcaatagccgtaaacgctgacaaattccccttcctccctgccttctgatgggggctgggcaggccagctggagctgtgtctcctgctgggattccggactgagagtgacagcaggtagtgaaacctcaagcaatttaaaacatggtattgttcctggaagactggttatgttggctagggtcagcaagagagggcatcaaggctgtagtctagcagtgatttaatctgcaagtcaaaccagacgggtattttgtattattcatatgtcacatcctaccaacagacagtaagtcaggcaaggctcctggtgctccttgtcactcacgtaattttcacatcaggaaaactctgggctgggtgcagtggctcacacctgtaatcctagcactttgggaaaccaa

SEQ ID NO: 34688 - DNA, 420 bp, Homo sapiens
ggttttttgttttgaaacttacaaagagtttcaacgtctcacacaaatttgcctacaaaaaatttttttcataccaaagaccaaaaaaaataacagacatagacaattcacaagaattaatggggtgaaggcaagtgtcaaacaaattatgggacattcacaaaatagaaaagtccacactcattaaaagttttcattgtaaaatataataacagagcaaaatgcttataatgttttatgaaaaaggatgataaaactgccattctgatagctatatgtaagcagacaaagactgaaaggaaaatgttgaaatgaaaaatgattctcacagagcaacggaatgagtatgccctctccaaatgcttctaggccatcatattgatcttgcaactaagataaggcctgcccattgctctaaga

SEQ ID NO: 34689 - DNA, 493 bp, Homo sapiens
cgggaatgagactatagagcatcactacgccaagcttggcacgaggaaagaacgcacactttcaattttattgaggccttcaacactatttattagaaaatgtatgaatttgacattctggagttattataacattagaaaatgagcataacattcactctgattttagccattaagggagattagtaaacagactgctacagtgttccatagttggactgtgcatccaaaacatttttttatctttaataaatggtacagtttttatgtagttttcgaatgtaagaagaaaggaatgctgaccaaaacttgatttcatcagcttcatgaaaaggactagtgtcattaacctgttgaacagaattggtttattaaaaaaatcatttccagtagtgtgaaacctttacgagtctttaacatctaaatgttatgactccttgtaccttaagttttccagtctttcttatttatatcatctccaagtacctttggg

SEQ ID NO: 34690 - DNA, 449 bp, Homo sapiens
ggcggcctcgtctcctaagcccctccctcctcctggctcctcttccctgtcctgtctgggccatgtgggggacaggaggctttcctctccctggaccccctggccagcctcgggtgcggggcccgacagcagctcgagggtctccttgctgccgcccttcctgagtgaccaggcacagcacgtgcacgccctggggaacttctacctcttctgccaggccacaggtcctgcagacattcgctttgtctgggagaagaatgggcgagctctggagacctgtgtccctgtgcagacccatgcactgcccgatggcagggcccatgcactcagctggctgcaggacgccatcagggaaagcgctgagtatcgctgctctgtcctctcctcagcagggaacaagacttctaaggtgcaggttgctgtgatgagacctgaagtgacccaccagg

SEQ ID NO: 34691 - DNA, 381 bp, Homo sapiens
  misc_feature (1)...(381): n = A,T,C or G
agcntgttgtgtgaggatcccggggccgtcgcgtcgctcgggccccgccatggccgtcaccatcacgctcaaaacgctgcagcagcagaccttcaagatccgcatggagcctgacgagacggtgaaggtgctaaaggagaagatagaagctgagaagggtcgtgatgccttccccgtggctggacagaaactcatctatgccggcaagatcttgagtgacgatgtccctatcagggactatcgcatcgatgagaagaactttgtggtcgtcatggtgaccaagaccaaagccggccagggtacctcagcacccccagaggcctcacccacagctgccccagagtcctctacatccttcccgcctgcccccacctcaggcat

SEQ ID NO: 34692 - DNA, 464 bp, Homo sapiens
  misc_feature (1)...(464): n = A,T,C or G
caattgggattcgtngcgactctcgaaacccactactcgcagcttggcacgaggcattgacctcgtgttggaccgaattcgcaagctggccgaccagtgcacgggtctccagggcttcttggttttccacagctttggtgggggaactggttctgggttcacctcgctgctcatggaacgtctctcagttgattatggcacgaagtccaagctggagttctctatttacccggcgccccaaggttccacagctgtagttgagccctacaacttcatcctcaccacccacaccaccctggagcactctgattgtgccttcatggtagacaatgaggccctctatgacatctgtcgtagaaacctcgatattgagcgtgcaacctatactaacctgaataaggtaataggtcaaattgtgtcctccatcactgcgttcctgagatttgatggagccctcgatgttg

SEQ ID NO: 34693 - DNA, 444 bp, Homo sapiens
  misc_feature (1)...(444): n = A,T,C or G
attgannaacagctatgatcgtgatatcatccagcttggacaacgccctatttggcactatggtagcactctgctgcccaggcctggagtgcaatggcacaatctcggctcgctatagcctgtgcctcctgggttcaggcaattctcctgcctcagcctcccgagtagctggaattacaagtgtgcaccaccatgtccagctagtttttgtatttttagtagagattgggttttgccccattggtcaggctggtctcgaactcctgacctcaagtgatccgcctgcctcggccttccaaagtgctgtgattatagacatgagccactgtgcctggtcttggatgagatttaaatgggaggacttggagtaaagcagattaccctccataatgtgtgtgggcttcgtccagtcagttgaaggccttcctacgtcaaaggctgacg

SEQ ID NO: 34694 - DNA, 445 bp, Homo sapiens
  misc_feature (1)...(445): n = A,T,C or G
ggggccntttganaacagctatgataganaacactcaagcttggcacgaggcctatgttcaactttgtgtcatttaccttataatttgaggaggggtttccctttgggcctcagtgttacaaattactagtgctattttcattattattgtaatggaaaaatctgtggactagaataaaagagtttattgaataagaaatatgattgggctcattgcacatcagtgactcctagaaaaaccattgcaatgttaccatcagaaataataatcagccagcagttgatttaaggtataatttagtaaacgattccaacttctattacctcccctgaaatcggncctgatatattcgagaagcatgaggccagcccttcagatgcagttgtttatttatactcaggtttaaattgggaagaggcccacggaggagcagcaacttgcctg

SEQ ID NO: 34695 - DNA, 420 bp, Homo sapiens
ggcacgagcagacaccaccgtgtactccagtgaggaagcagaacttttaaagctgatagagattggagtgcaaaccggtagcacagcccagattctccagcctgactcggggaccacactgagctctcctcctgtttaaaaggaagcatccacacccccaactcccggacatcacatgagaggtgctgctcagattttcaagtgttgttctttccaccagcaggaagtagccgcatttgattttcatttcgacaacagaaaaaggacctcggactgcagggagccagtcttctaggcatatcctggaagaggcttgtgacccaagaatgtgtctgtgtcttctcccagtgttgacctgatcctctttttcattcatttaaaaagcatttatcatgccccctgctgcgggtctcaccatgg

SEQ ID NO: 34696 - DNA, 486 bp, Homo sapiens
  misc_feature (1)...(486): n = A,T,C or G
tggagagcncngnnngggttttnncctgatnactctagcctgatcncanctccagcttggcacgaggatgggcaccaatgagcatgggagataggccaaaggggtgctgagggcagctcaacactggcctgcaagcatctctgaacatgaacagcctgggtgccatgaacaatggcaggaggcaaacaggcaccttggcagaaaggggagagtccctactgaagccctaccttcaagctggggaaggcctgaatcttgggggccaggctgacagtctcacagaccatagtgggaacttacagtgctttttccaacccatggctgcccttggagcaatcagatcacccttcctcccctctgaagcccataaaaaccccagactgtcagattcaaggagaaaatgggatgacctcactgtggagaaggagtacccactccagggtcttctgcctgctgagagctgagtaaatgagtggacaatcatgc

SEQ ID NO: 34697 - DNA, 445 bp, Homo sapiens
  misc_feature (1)...(445): n = A,T,C or G
nnaaagcctaagacggtcttacatgcttacgccaggttgggacgaggcatcgaccgcctaagagtcgcgctgtaagaagcaacaacctctcctcttcgtctccgccatcagctcggcagtcgcgaagcagcaaccatgcgtgagtgcatctccatccacgttggccaggctggtgtccaaattggcaatgcctgctgggagctctactgcctggaacacggcatccagcccgatggccagatgccaagtgacaagaccattgggggaggagatgattccttcaacaccttcttcagtgagacgggggctggcaagcatgtgccccgggcagtgtttgtagacttggaacccacagtcattgatgaagttcgcactggcacctaccgccagctcttccaccctgagcaacttatcacaggcaaggaagatgctgccaataactatg

SEQ ID NO: 34698 - DNA, 441 bp, Homo sapiens
  misc_feature (1)...(441): n = A,T,C or G
aaaaaccgttgacatcgtatgacctcanacgccgcttggacgaggcatcgaccgcctaagagtcgcgctgtaagaagcaacaacctctcctcttcgtctccgccatcagctcggcagtcgcgaagcagcaaccatgcgtgagtgcatctccatccacgttggccaggctggtgtccagattggcaatgcctgctgggagctctactgcctggaacacggcatccagcccgatggccagatgccaagtgacaagaccattgggggaggagatgattccttcaacaccttcttcagtgagacgggggctggcaagcatgtgccccgggcagtgtttgtagacttggaacccacagtcattgatgaagttcgcactggcacctaccgccagctcttccaccctgagcaacttatcacaggcaaggaagatgctgccaataactt

SEQ ID NO: 34699 - DNA, 401 bp, Homo sapiens
ggatgctttgccataaccacatttaatgggaaaaacggcagtatcactgatgtaaattaactcaccagatttactgggcctgaactcattctcttcttgctatatgatttaacaagttctagaaggtctccaagacaataattacattggcacaatgtatacttcagtgctcacccgtaggcaaatctctttttaaaaaactctttggtgcacaagtaacacatttggccacaaaacaccaaagaattgtaggcagtggcccctattgagaagttttccggtagagttggaaatcagttgtgaatacattctttgctagttggagtgcttgtttactaagcatgtgccgtcgtaggtattagtgctagtctcaaataggtgcttcccctgaggtgcagggg

SEQ ID NO: 34700 - DNA, 430 bp, Homo sapiens
ggtggcacgaggtataaaaccatgagactgtgtagctttgatcactattgtgtttgatttaaaaagtaaacattttgtgtttgagcttagagctaagtgatcataaatggggtatatttattcctaaaatttttctgggatttcagatcctgaaattttatacaaacctttaaaaagcattttcaggaggaaaatgtgtcagagccaagttgaaatttgaaatgcccttttttttttttttttaataaagggttttttatttttgaaaaaaaagggaatttttttttttaaaaagggggtttgctccttcccccgggcgggggggcaggggggcctttacagctccctgcggaaagctgttttttaaagccccgccaccgtggggggacccaaattatgggggaaaaggcaaaacccctttaaattgttt

SEQ ID NO: 34701 - DNA, 407 bp, Homo sapiens
gggtgtttcactgccagtcagctgtgatgtctgccacatttgcaaaatttcatccaaatcttgttgttggtggtacatattcaggccaaattgtgctttgggataaccgtagcaataaaagaactccagtgcaaagaactccactgtcagcagctgcacacacacaccctgtatattgtgtaaatgttgttggaacacaaaatgctcacaatctgattagcatctctactgatggaaaaatttgttcatggagtctggacatgctttcccatccacaggatagcatggagttggttcataaacagtcaaaagcagtagctgtgacatctatgtccttccctgttggagatgtcaacaactttgttgttgggagtgaagaagggtctgtgtacacagcatgccgccat

SEQ ID NO: 34702 - DNA, 428 bp, Homo sapiens
acaaggggggaaggtcaagacatcttgttcatgcaaacggattgatggccattcctaatctgattttattagtgtattttaggaagtaaagtaagattcttgagcccagctgaacttcccctattgaattttctaacaaaaagagagtttgcgtatgggtttataattgagcctgctcttgtagaaatgttttatcagaattgaaatcctctctgatccccaaattctagagacaaagttgttttctgaatttgagaaatctgttcagttcacaaggaaaggtgacaatgtgtcatttggatgttgtcccacacgtgaggcctcgttgggtgcttgtggtgggagggaccctccaggcaggctttgtatggagggttttcatgtctggacacatttctgttccgagaagcactgctgcgtttttggga

SEQ ID NO: 34703 - DNA, 457 bp, Homo sapiens
  misc_feature (1)...(457): n = A,T,C or G
ntaaactgatacctttgtgaactgcttacgccaagcttggcacgaggagatgggaactgtaaaagatcaagtatgctaattttaagcaaatgtaaaaactcataaaacaggtaaacagtggggggatttcatttgccataattcacataagacgaattttaatctaaaagtactttcttgcttgtattctgtgtggcttttttttgttttttgaggccatatctcactctgtcactcaggctggagtgcggtggtataatgtcagctcactgcaatctctgcctaccagggtcaagcgattctcgtgcctcaccctcttgagtagctgggactacaggcgtgagccatcacgcccagctaatttttggatttttagaaaagacaggatttcaccatgttttccacgctggtctcgaactcctgacctcaggtgatccgcctgccttggcctcccaaa

SEQ ID NO: 34704 - DNA, 415 bp, Homo sapiens
ggtgcacatactctttgacccaaccatgctaattaccggaattgttaatgtaaccgtactcacacacatgctaaataacatgccgagctagagtttagaaataacctaagtacccatcagtggggtacctattaagtaaattgtgggccatccatacaatggaatatcatacacctgtataaaaagaaaatgaggaatgccttattgctagagtcaccaaacttttcctataaagagcaaatgataagattggtggttttgcaggccatcaggttcaattcattcaatagctattatgcagccccgctgttcatcattgaaagcatgcataaacagtatttatacaaatggacatggccatgttccaataaaacagtattttatagatacgcaaaaagctggattcgtaccttgg

SEQ ID NO: 34705 - DNA, 367 bp, Homo sapiens
ggcacgaggatgaatttaaacctcttgtggaagagcctcagaatttaatcaaacaaaattgtgagctttttgagcagcttggagagtacaaattccagaatgcgctattagttcgttacaccaagaaagtaccccaagtgtcaactccaactcttgtagaggtctcaagaaacctaggaaaagtgggcagcaaatgttgtaaacatcctgaagcaaaaagaatgccctgtgcagaagactatctatccgtggtcctgaaccagttatgtgtgttgcatgagaaaacgccagtaagtgacagagtcaccaaatgctgcacagaatccttggtgaacaggcgaccatgcttttcagctctggaagtcgg

SEQ ID NO: 34706 - DNA, 404 bp, Homo sapiens
ggtttttgttggggtgagctgcgtggtcccttctttatcactcctccatcacccccttccagtagaggagtccttgacttgccagatatttggttttgtagtatcagttctgaagagcgtctccatggcttctctggcctgtatcagcattgatagatacattgccattactaaacctttaacctataatactctggttacaccctggagactacgcctgtgtattttcctgatttggctatactcgaccctggtcttcctgccttcctttttccactggggcaaacctggatatcatggagatgtgtttcagtggtgtgcggagtcctggcacaccgactcctacttcaccctgttcatcgtgatgatgttatatgccccagcagcccttattgtctgcttca

SEQ ID NO: 34707 - DNA, 414 bp, Homo sapiens
ggattatctgagtctattgagatgtaatgcagatcaattttgatttttaaaaatcaaaagcctacaataactctgactctcagcaacttcctcggcgttgttgcacctgacgtggagagagctcgtaggcttccccagtgcctcagccgcttcctggtggaagttaggtgctaatggaggtgtgttcaccttttagtgatatcactgcaggcctttgaggggcctgagagtgaatcagaggcattagagacaccggtgcagttatctggagcacaatttctttgcagggcagcagaatcagaagccagacttggccatgtgaacctcgaaactcggtttcccggccgccatcaaccgccacccttactgcctagtcacacacgtcagggaggctgccctcagtggagttggggt

SEQ ID NO: 34708 - DNA, 460 bp, Homo sapiens
  misc_feature (1)...(460): n = A,T,C or G
ttttnttgatnacattttgaccactcattacgccaagcttggcacgaggatgaaaagccattcagagatgaagttggtatgtggcttcattctggaacctcggctgttgattcaacagagaaagggacagattgttccaaccgagcttgcacttcacttgaaggaaactcagcctggattgcttgtggcttcagttctgggcttgcagaagaacaacaaaattggaattgaagaagcagattccttttttaaggtgctttgtgctaaggatgaagatacaattcctcagctcttggtagacttttgggaagctcagctagtggcatgtctcccagatgtggtacttcaggaactctttttcaaactcacatcacagtacatctggagattgtctaagaggcagcctcctgacaccacaccattgcgaacatcggaggatctgataaatgcctgtagtcat

SEQ ID NO: 34709 - DNA, 424 bp, Homo sapiens
ggatacgcctctattacatgagttgcatttatcattcagttaatgtgatttcactttgaaattctgtgactttttcaaaaagagatgtgtcgccaagatgaaaatgtagtactaaatggacaggataaaagaaattgcatatatatgggatatttgaactgataaaactgttgttatagaaacaacataaacaatgaagccttgtatttaaaacctataaaagcaaggaggtaccacagaatccatggcagtaacacacctttagtaaaccaagtaaacactgtaatttttttcagcaataatcataagttagcaattctaattatttaaatgaggagctcctgaatttaattattctagatctgtgaaatatcattaagacccaaatacaatgttgtattatttcacatcgtgttcactggta

SEQ ID NO: 34710 - DNA, 434 bp, Homo sapiens
  misc_feature (1)...(434): n = A,T,C or G
acaaggggcacatctcccctggctgacttacttccctattataaagacccttgtgggccaggcatggtggctcacacctgtaatccgagcactttgagaggccaaaccaggtggttcacttgaggccaggagctcaaaactagcctggccaacatggcaaagccctgcctctactaaaaatataaaaattagctgggcatggtggcgcatgcctgtaatcccagctacttgggaggctgaggcaagagaatcacttgaacctgggaggctgatgctgcagtgattctcctgcctctactaaaaatataaaaattagctgggcatggtggtgcatgctctgtaatcccagctacttgagaggctgaggcaggagaatcacttgaacctgggacgctgacgctgccctgagctaaaatagcaccactgcattcaan

SEQ ID NO: 34711 - DNA, 416 bp, Homo sapiens
gggcataatattgaaatatttcatgtcctattttaatagaaaacctcagggcccaagtaacagtgatagaagttagaaaaacctttacttagaattgtccacctagtcagagcccaagaaagaattttcagtggaaaaatcaatatataacttagtgctagctagcgccacagactctagtagataatattatcatcataatggctggtgaaaccatataatcacagaaaaacattgccttcagcatgttcagttcgcagcactgagggcactcttgagggtgttgttaatgaagatttaatttttaaatacaggtggttccaagctttcaaataggttatgctccaaaagtgttatttgtaagttaatttttttacaagtcaaacaatgttggaagtggtatttaggttctagat

SEQ ID NO: 34712 - DNA, 434 bp, Homo sapiens
ggggggtatcctaatcgttgtcttggtcactcttggttgggcctgggtgactttgccagtcagctcctacagggatcagttggccacctctagatctgtgtttgccggtctagacgttatcggtgcacttccttgaagtgccaggttgcagcgatcccagagcgttgataacgtgatctgatccctaagttgagacctgtcttcctgtaacgcttccgaataagaggtccggtcgaaaagagttgaaagatacgaaattaggtggtcgttggaatcctgatcgcagtaaagtggtccttggtaactgctcgagtagaacatgtctgcatccgccaatagtccgctaatagggagggctgtgcgaataaaggcttccatcgattgggtagtggccttcaagcgggaggcgaaagccagtcgggcatatgtcatag

SEQ ID NO: 34713 - DNA, 479 bp, Homo sapiens
  misc_feature (1)...(479): n = A,T,C or G
ntgggaaacgtttgaaatgcctacgccaagcttggcacgaggcagctctcggcgcacggcccaacttccttcaaaatgtctactgttcacgaaatcctgtgcaagctcagcttggagggtgatcactctacacccccaagtgcatatgggtctgtcaaagcctatactaactttgatgctgagcgggatgctttgaacattgaaacagccatcaagaccaaaggtgtggatgaggtcaccattgtcaacattttgaccaaccgcagcaatgcacagagacaggatattgccttcgcctaccagagaaggaccaaaaaggaacttgcatcagcactgaagtcagccttatctggccacctggagacggtgattttgggcctattgaagacacctgctcagtatgacgcttctgagctaaaagcttccatgaaggggctgggaaccgacgaggactctctcattgagatcatctgctccag

SEQ ID NO: 34714 - DNA, 477 bp, Homo sapiens
  misc_feature (1)...(477): n = A,T,C or G
agagcncnnnncccccatagtatatgcctgggtactanctgcaccnaccttggcacgaggaacattttcaaaataatgggtaaaatggtaatttgctaaaggaaattcagagaagagtttctaaagtgtataattggactgtggtctttgtagaaatttcatatgcagagtcccttggaaagatgccttgagcttgtctcaggtccctaaacttagaaagtcctattctttttcccaaattctgacatgtgctggatcagagtgttctcatttccaataggccagtctgccatccatccaggaagaactgcggcacatggctgatggtgctagagaggtaggaaatatgactggaaccactgagatcaactcagatcaaggcctagaaaaagacaactcagagttggggagtgaaactcggtacccactgctattgcctaagggtgtagtcctgaaactgaagccagttgccgaccg

SEQ ID NO: 34715 - DNA, 424 bp, Homo sapiens
gttggccccactccacttgggggtctgcattggattgttagggataggcagcagggctgaggcaaggtaggccaactgcacccctgtcacctggaggagggccagctcgctgcccgagctctggcctagggaccttgccgctgaccaagagggaggaccagtgcagggtctgtgcaccttccctgctggcctgcacacagctgctcagcaccactttcattctggacctgggaccttaggagccgggtgacagcactaaccagacctccagccactcacagctctttttaaaaaacagcttcaaaatatgcagcaaaaaccaatacaacaaaacgagtggcacgatttatttcaaactaggccagctgggattccagcttttcttctactagtctgatggtttataaatcaaaacctgggtttg

SEQ ID NO: 34716 - DNA, 460 bp, Homo sapiens
  misc_feature (1)...(460): n = A,T,C or G
agaacgtccactganaccgttcctgatgacttctccagcttggcacgaggagcggcatgcagaccctcagaccagaatggggacatcttgtggtctgctgcctcaggaatctcctgaccacttgtagtccctccgacttctctagacatctagtctcagtgctagcttatttgtatttttcctctttcacttcttatggaggagagtgtttaactgagttagaatgttgaaactgacttgctgtgacttatgtgcagctttccagttgagcagaggaaaatagtggcaggactgtcccccaggaggactccctgcttagctctgtgggagaccaactacgactggcatcttctcttccccctggaaggcagctagacaccaatggatccttgtcagttgtaacattctatttcaacttcaggaaagcagcagntttcttttaatttttcctatgaccata

SEQ ID NO: 34717 - DNA, 436 bp, Homo sapiens
ggagagagagccacagcccaggagctcctagaccaccccttcctgctgcagacagggctacctgagtgcctggtgcccctgatccagctctaccgaaagcagacctccacctgctgagcccaccccaagtatgcctgccacctacgcccacaggcagggcacactgggcagccagcctgccggcaggacttgcctgcctcctcctctcagaattctctccaaagattgaaatgtgaagccccagccccaccctttgcccttcagcctactgggccaggccggacctgccccctcagtgtctctccctcccgagtccccagatggagacccctttctacaggatgaccccttgatatttgcacagggatatttctaagaaacgcagaggccagcgttcctggcctctgcagccaacacagtagaaaaggctgctgtg

SEQ ID NO: 34718 - DNA, 411 bp, Homo sapiens
ggcggacaaagcatgctggggaggtgaggaggagtcaggaaggacatccaggtctcaggctccactctctgggtaggtagagctgtacttaataaggaggagcaggttagaagggagatccttctttctagtgggacaaagcagcctcatcattcatggtgtttaaatgttttcattggccagaacctttacctgaacaaggcagtgaatttcagcgatcaccttctgagcagtgctgccgagggtgatggggggctgtgcggcagcaggtccagctggggtgagttattcccttctggcaattttaaaacaactgaccaggaacacatggacttggcaggtatagcagagaactgctaagagtttgacagcccggtcacagatcttgcagttatgttccagacgttttaa

SEQ ID NO: 34719 - DNA, 451 bp, Homo sapiens
  misc_feature (1)...(451): n = A,T,C or G
gggttatgttgcattttctcagctcctggggatggaaatggaggatcccagaacacacagccctggccccttttgattctagggcctgcacagatctctggttcaaatgcacaggccctcagaatagaggaacatgaagagagatcttatagcacacagtttaatgtgagagcctgggtgtctgacaccgggagggcccatcagtgaggggcaggctcttctggtcaccaggctgttcagtggactcagttcttcatcttgtaatgtcgatggctttgtcacaccatgtcaagcccatgccataccttgtcaagaatgtcaaagaggttgtggttaggtcaaactggctttggttctgatggttaggaagaaacaggtcagccctcagatcacctggcccgggacagctgacccccttagacccatggctcntgcataagctaggacctaa

SEQ ID NO: 34720 - DNA, 501 bp, Homo sapiens
  misc_feature (1)...(501): n = A,T,C or G
agggggggccgttttntatgaagacgtatgacatggataacctctgctaggcacgaggggagagtccagtttgcagcattttctgaaaatctcaaaaaaatttttaggcagcctttctaacaacatgataaattcagaatactatgcaaggtcttttaaaaataattgctattcttatacaaattgctggttgggggtgggggatatattttttcatatattttcatagggttcaaatggaagtggtaaggaaatctgaatagctaatgaaatagctgtgttttgtaaaaagaaatgtaaaagctattaaaatgttacattaaaatccacttgagatgcctaaaatgtactcagcagctctttgcatgttgtaattttcatatcaaaatgctttatttacattggaagagaaatttccattacaaaacaaaaactgacatgaacgattatttcaaaatagtattttgtagctaatttttaaaaattttggagcactattat

SEQ ID NO: 34721 - DNA, 416 bp, Homo sapiens
  misc_feature (1)...(416): n = A,T,C or G
ggcacatggataacttcaacagcattctactgggccttgctgcctttagactcacccattttccagttctgtatatcaaggctttcctcaagcatgaaacctcctccaacaaaactgctataaaatctttgttggttcatcgatgtctgaagcacaaagttcagactccttaccctggacctaaagaacctgcgtaataggttccaactcccctacatacaagaagtcatggtggacgaggaaaagaatctggactctagtgtggactgtcactaacctactttgtgactgccagcaaagcaccaacctctctggccttgtttactcatctgcaccaaggagctgaactcctaccacgactacaaatgctccttgacttatgatnggggttacttctaataaaatcatcttanatn

SEQ ID NO: 34722 - DNA, 481 bp, Homo sapiens
  misc_feature (1)...(481): n = A,T,C or G
cccaagttgntttgaattcataccatctgcnnacgccaagcttggcacgagggaacaggtctggggctcagggtggcctttaactgccttcctcaccttcttccaggngggcgtggacttcactggctccaatggagacccctcctcacctgactccctacactacctgagtccaacaggggtcaatgagtacctgatggcactgtggagtgtgggcagcgtggttcaggactatgactcgtgagtacctgcttctctgggctatacccgctccctgcagatgcttcagcctctgagcttacagtcccctcactgccttttgcccaatacactgtcctcccacagagacaagctgttccctgcatttggatttggggcccacgttccccctgactggcaggtgagctccctctctttctgccactcctgttttcactttcagggtcctgactttgggggatgcggtaaatttacttgctag

SEQ ID NO: 34723 - DNA, 432 bp, Homo sapiens
gggtttagaacaaagtctgccttggaccctttcagaagatgacaggattttttaaaaaaataattgcgcccccccgccccgtgccttggagatagtaagaattggagcagagcactgggacttcaattcacgcatggaaagagatctttgttagttggaggaaggagaacttgcctgagcttcgggcctttgttttgtttttgtgagagggacgtgtctcctaaatgaatgtttgctccagcgttgcacctcaaataagtcacctaaatatccacgccctctttatccaccccctctttactcgtgtgactagaatagttttcatttttcttctcaagggaatggctaaacagctcctatctgggcgtttgatagactgtcattcaagaatgagtgaagttgaggtgcctataagcaactcagaaattgttg

SEQ ID NO: 34724 - DNA, 427 bp, Homo sapiens
acaggcaaagaagatgctgccaataactatgcccgagggcactacaccattggcaaggagatcattgacctcgtgttggaccgaattcgcaagctggccgaccagtgcacgggtctccagggcttcttggttttccacagctttggtgggggaactggttctgggttcacctcgctgctcatggaacgtctctcagttgattatggcaagaagtccaagctggagttctctatttacccggcgccccaggtttccacagctgtagttgagccctacaactccatcctcaccacccacaccaccctggagcactctgattgtgccttcatggtagacaatgaggccatctatgacatctgtcgtagaaacctcgatattgagcgtccaacctatactaacctgaataggttaataggtcaaattgtgt

SEQ ID NO: 34725 - DNA, 433 bp, Homo sapiens
  misc_feature (1)...(433): n = A,T,C or G
ggaattttttttttagccaaatctttagtctggcaacaaaagatattcagttacaaaatatatagggtaacccaaggaataagggctttttcttaaatccaaaaagaggcaaattatctgggtaatggccttttgcagtttaacctttatttgtaattaccttggcattttctgtttgcagtaacaacatacttacccatggagaaacaagtgcacagaagtatatcagcacctagtgaggcagggcttttgtgcctggctctgttttgcctcatttgtactttttaaatgaaatgatccattctaattttaagcttaagtcaacaatgtggctaaatggttgcattacatgtaagaactgattgttgtttgtaaaagaaacaggcatttgtcaagaaaggaaatattaaactggaaatgggctttcattcan

SEQ ID NO: 34726 - DNA, 471 bp, Homo sapiens
  misc_feature (1)...(471): n = A,T,C or G
aggaggggggccggcaatgaaanccctaagtnacgagcacctgcntacgccaagcttggcacgaggaaaaaatctatgagtttattccacctttcatccattgcatttgtgatgttattagttagcaagatggacactgttctttagaaaggacttatttaatattaaccacgtcataaagcaagatggcccccagtccctacaagcaagtgcaattaaaaataaaagcaaatgttactgagccctgctgaactcctgataaaaaaaattatgtttatgggacatataaatgtctcaatcatgcaaattgtcactcttgttaatgaaacaattttgtaaaaagatagtcctctaaaaggggttaatggtttttacctatctaactgtctaattagatttacacatcccgcaaggcaggggagcctgaagcttttccaaaccaaatcgtttgccactagaaactattttcag

SEQ ID NO: 34727 - DNA, 433 bp, Homo sapiens
ggcagcagcctccgggggaaaaaagcttattctagcagtcagtgacttacttgcactttttgcacatagatataaagtaaaattatgttattaatttggcttagtctgtaatattacacagtaatggtaatttataaaggagtgtatagtagtatactgactgctaagtgtactatactgtttgctttactaatcacctaattcattgcagttcatacttattgactcagagtttaaaaccacaatctgtaggctttaagaattgcttttaaacctttttaagtgataaactcttgaagtggtcttaaggttagcaaataattgtctgtattaaacatggcgttatttaagtagtcctgctgcaagaaaggcacttcagtgaatatgtgactagtaaagcttaaatatgtttggatctaatagagctcatgaa

SEQ ID NO: 34728 - DNA, 418 bp, Homo sapiens
  misc_feature (1)...(418): n = A,T,C or G
ggagaaaattggctacaaccccgacacagtagcatttgtgccaatttctggttggaatggtgacaacatgctggagccaagtgctaacatgccttggttcaagggatggaaagtcacccgtaaggatggcaatgccagtggaaccacgctgcttgaggctctggactgcatcctaccaccaactcgttcaactgacaagcccttgcgcctgcctctccaggatgtctacaaaattggtggtattggtactgttcctgttggccgagtggagactggtgttctcaaacccggtatggtggtcacctttgctccagtcaacgttacaacggaagtaaaatctgtcgaaatgcaccatgaagctttgagtgaagctctttcttgagacaatgtgggcttcaatgtcaagaatgtgtctggn

SEQ ID NO: 34729 - DNA, 420 bp, Homo sapiens
gggccaggcagagcctggagtcttacctgtcagactacgaggaggagcccgcggaagcgctggccctggaagccgccgtcctggaggccacctgaagaaagcacgtgcagccctccctccgggccgggtcacacctgttgcagaactgagccactctttgaaggactcgccccacctggggcttcttttttttttttttttttaaaaaaaaaacaccttttttttttttttaacgacctgggcaaacgcggggggcaaacacccccccgggggttggggggcccaaaaattgggggggaaaaaaatttggaaaaccccgggggtttcattaaaaagggaaggggggccctttaagggaactttttaggcccttttccggggaaaaaaacaaaaaaacaaagtttttccggggtgggggcc

SEQ ID NO: 34730 - DNA, 485 bp, Homo sapiens
  misc_feature (1)...(485): n = A,T,C or G
tgggcggggnngttttnntttgagnaccagtttgactgtgattacacctatcatgatgactacgcctagcttggcacgaggaaaaaattggctacaaccccgacacagtagcatttgtgccaatttctggttggaatggtgacaacatgctggagccaagtgctaacatgccttggttcaagggatggaaagtcacccgtaaggatggcaatgccagtggaaccacgctgcttgaggctctggactgcatcctaccaccaactcgtccaactgacaagcccttgcgcctgcctctccaggatgtctacaaaattggtggtattgggactgttcctgttggccgagtggagactggtgttctcaaacccgggatggtggtcacctttgctccagtcaacgttacaacggaagtaaaatctgtcgaaatgcaccatgaagctttgagtgaagctcttcctggggacaatgtgggcttcaatgtcaag

SEQ ID NO: 34731 - DNA, 390 bp, Homo sapiens
ggtttgcctccatcgtcacaggggtggaggagggccgcctgatcttcgacaacctaaagaagtccattgcctacaccctgaccagcaatatcccggagatcacgcccttcctgctgttcatcatggccaacatcccgctgcccctgggcaccatcaccatcctctgcatcgatctgggcactgacatggtccctgccatctcactggcgtacgaggctgccgaaagcgacatcatgaagagacagcccaggaacccgcggacggacaaattggtcaatgagagactcatcagcatggcctacgggcagattggaatgatccaggctctcggtggcttcttctcttactttgtgatcctggcagaaaatggcttcttgcccggcaacctgg

SEQ ID NO: 34732 - DNA, 438 bp, Homo sapiens
  misc_feature (1)...(438): n = A,T,C or G
gcccgccattgaaaacatnnnaatgagaactttcatacgcacaaggcttcatatccgcaaccaattccttgagcgcagccaccactcccacagttggttcttccaggggacccagccccctaaccatgggagctcaggacactctccctgttgcagcagcatttacagaaacagtcaatgcctatttcaaaggagcagacccaagcaaatgtatcgttaagattaccggagaaatggtgttgtcatttcctgctggcatcaccagacactttgccaacaacccgtccccagctgctctgacttttcgggtgataaatttcagcaggttagaacacgtcctgccaaacccccaacttctctgctgtgataatacacaaaatgatgccaataccaaggaattctgggtaaacatgccaaatttgatgactcacctaaaga

SEQ ID NO: 34733 - DNA, 485 bp, Homo sapiens
  misc_feature (1)...(485): n = A,T,C or G
attgaaaccnttgtcagtgatccgtccagcttggcacgagggctggaatgtcgatttgtccctggatgtcctgctggctctccctcgtgggagtgggtccctgtattcaggaatccatgtgaggcagcgtgtggctgtgtgtttgttaggtctggggtcaatctcaactccacttttgggcaaattactgaacccctttcctcacttaggaaatggtggtggggagccctaatcccaaggtggtggcagggtgacatcagggaaggacaaccagtgagttcctgtccctttcagtcctcacagggatactttaacattaccatcactatctttcccgcccccccaagacggagtcttgctttgtcgcccaggctggagtgcagtgatgccatcttggctcactgcaacctccacctcccgggttcaagcggntctcctgcctcatacctccccggaggggnnaatccaaaccctttgttacatgt

SEQ ID NO: 34734 - DNA, 401 bp, Homo sapiens
aagcaaaagaacttatatgagaaaaatggcttacttaaaaattacggggctgggcatggtggctcatatctgtaattcccagtactttggaaggccaagatgggaagattacctgagcctaggagttggagaacagcctaggcaatatggcaagccctcatctctaaaataaataaacaaacaatttttttaaattgtggtcccagaaacaccattttgaggaaattttccaagagccaggggatctttgaaaagaggctactgaggtagctaaacacaaccccaacaaagataaaaggtttaagtaatactggaagacaggcaaacagtacctacaatcttttaacttcccatcagcctagagatcctcagctctacactagatcccccatcacaggccc

SEQ ID NO: 34735 - DNA, 455 bp, Homo sapiens
  misc_feature (1)...(455): n = A,T,C or G
ataaatcagtttaacctttgaaaacgtntgacaccaccttggcacgaggcactccctgcttggtgcccacagggctgcgcactgccagggcatgttcagttcttgtggggctcgctctcactgctactgcttcctgggaggtgcatccctcttggtgaagtggcctaatgccccccagccaccctgacttcccaccattccctcccacgggaaacgcacaaaacgtcttgagggagattttgacaagtcacccattccaggtgccacaggcaggggatgtttaataatccaagatttctctgagaactgggatatgtggcccttttttttttctttttatcttttatctggaaacggggctggggtcaaccccaagagtatttgcaaaaggcccaccacagggggggctattggcttaaggcagggaaggcattcccaactaaataaccgggtgg

SEQ ID NO: 34736 - DNA, 386 bp, Homo sapiens
  misc_feature (1)...(386): n = A,T,C or G
aaatgccatcatctataacaacaatgaggacttccaggtcggacaagccaaggtggtcctgaagagcaaggatgaccaggtgaccgttatcggggctggggtgaccctgcacgaggccttggccgctgccgaactgctgaagaaagaaaagatcaacatccgcgtgctggaccccttcaccatcaagcccctggacagaaaactcattctcgacagcgctcgtgccaccaagggcaggatcctcaccgtggaggaccattattatgaaggtggcattggtgaggctgtgtccagtgcagtagtgggcgagcctggcatcactgtcacccacctggcagttaaccgggtaccaagaagtgggaagccggctgagctgctgaagatgn

SEQ ID NO: 34737 - DNA, 436 bp, Homo sapiens
ggaaacaatacttctttaaaaacggattttatgagctatttattgatattctaatgggtttaagaaggataattttccaaaacctaaatgctacacattttacagtggcgatatcaaccttatcatgagctaaagatttgcaatcaaaacattggcggagtgcattgctgacttataacaagcgtctcaggaccaggatatttggtagggatccttaaatatatagatgcttaccagtccgtttaatagaagatttctgaaaggtagcgcaagagcttatttcattatttttatttttatttttttgagacagagactgactctgtcatctacgctggattgcactggtgcaatcttggcttgctgtaatctacaccttccacggtcaaaccattctcccacctcagcctcccgagtagctgggattacaggcatg

SEQ ID NO: 34738 - DNA, 424 bp, Homo sapiens
ggcaagccggccatattagagagatggaaataaagcttccttaatgttgtatatgtctttgaagtacatccgtgcatttttttttagcatccaaccattcctcccttggagttctcgccccctcaaatcaccctctcccgtagcccacccgactaacatctcagtctctgaaaatgcacagagatgcctggctacctcgccctgccttcagcctcacggggctcagtctctttttctctttggtgccaccaggacggagcatggaggtcacagtacctgccaccctcaacgtcctcaatggctctgacgcccgcctgccctgcaccttcaactcctgctacacagggaaccacaaacagttctccctgaactggacttaccaggagtgcaacaactgctctgaggagatgttcctccagttccg

SEQ ID NO: 34739 - DNA, 415 bp, Homo sapiens
ggaaaaaagtatatatatgccaggctggtggtccatgcttgtaatcccagcactttgggagactgagtgaggaggatcactcgagcccaggagttcaaggctgcagtgacctgtgatcacatcactgcactccagcctgggtgacagagcgagaccctgtctctaaaaacatattagctcagcatcctccctgcttcaagccctcccagactctccattgttctcaagataaaaattccccttctcccgctgtgtaaaaatctggcggttcctcacacagttaaacatagaagctgggcacagtggtacgagcctgtagtctcagctatcgggaagctgaggcgggaggatcacttaagcctaggaattggaatccagcctgggcaacacagtgagacccccgtctctaaaaata

SEQ ID NO: 34740 - DNA, 482 bp, Homo sapiens
  misc_feature (1)...(482): n = A,T,C or G
agagcggnnnnnnnnccctgattaccatgatgacagtcatacgcccttcttggcacgaggcacatggataacttcaacagcattctactgggtcttgctgcctttagactcacccattttccagttctgtatatcaaggttttcctcaagcatgaaacctcctccaacaaaactgctataaaatctttgttggttcatcgatgtctgaagcacaaagttcagactccttagcctggacctaaagaacctgcataataggttccaactcccctacatacaagaagtcatggtggacgaggaaaagaatctggactctagtgtggactgtcactaacctactttgtgactgccagcaaagcaccaacctctctggcctttgttactcatctgcaccaaggagcttgaactctaccaggactacaaatgctccttgacttatgatgggggtaccttcctttaaatccatctttaaattgaaatgg

SEQ ID NO: 34741 - DNA, 459 bp, Homo sapiens
  misc_feature (1)...(459): n = A,T,C or G
nctgatacagtcgacctgatacgccagcttggccgaggacacacagattcccagaagctgaacaagatcatatctgaaatacaggctttacaagaggtggtggctcgatttagacaactccggttagatgctactgaatttgcctgtctaaaatgcatcgtcactttcaaagccgttcctacacatagtggttctgaactgagaagtttccggaatgctgccgccattgcagcccttcaagatgaggctcagctaacgctcaacagctacatccataccagatatcccactcaaccctgtcgctttggaaaactcctgttgcttttgccagctttacgttctattagcccatcaactatagaagaagtgtttttcaaaaaaaccatcggcaatgtgccaattacaagactgctttcagatatgtacaaatccagtgatatctaagctcacaagataccc

SEQ ID NO: 34742 - DNA, 479 bp, Homo sapiens
  misc_feature (1)...(479): n = A,T,C or G
aggggttttttgagacctgatgaccatcttacgccaagcttggcacgaggctcgactcttagcttgtcggggacggtaaccgggacccggtgtctgctcctgtcgccttcgcctcctaatccctagccactatgcgtgagtgcatctccatccacgttggccaggctggtgtccaaattggcaatgcctgctgggagctctactgcctggaacacggcatccagcccgatggccagatgccaagtgacaagaccattgggggaggagatgactccttcaacaccttcttcagtgagacgggcgctggcaagcacgtgccccgggctgtgtttgtagacttggaacccacagtcattgatgaagttcgcactggcacctaccgccagctcttccaccctgagcagctcatcacaggcaaggaagatgctgccaataactatgcccgagggcactacaccattggcaaggagatcattgan

SEQ ID NO: 34743 - DNA, 419 bp, Homo sapiens
  misc_feature (1)...(419): n = A,T,C or G
gggccctgtcaggagcacagcatctttccagaggaggtggagtctatcttggggaaaccaaatttccagattttcccagaggctcagcaactctggcctcaggcttccttcccagaggcagcgtctgggctgtgctgtgctgtggaggagggattgcaggatggatggagctgggactggggctgtctgggtggctggtatcctcgtttgatacaggtggagtctgtgtgtctccagtgattgattggttcagaatggttctgtgatgccttttttccccctggggtcaggggtgtggggaagtggggaaagagggcccctcagggaatcagcagggctgatgggagctactgccggaggcttttgtcacaccctgtacacagtctgatcccgctcatctgggccctgcattcatttcn

SEQ ID NO: 34744 - DNA, 469 bp, Homo sapiens
atttgagacccgtttgaccttgattaccctcagcttggcacgagggaaaaggagaagcgtcatcctctgatgagggcagcgattccagcagtagctcatcagagtccgagatgacatcggagtccgaggaggagcagttaaaacctgcctcctggagcaggaaaacacctcccagcagcaaaagtgctcctgcaaccaaggagatctccctgcttgatctagaggatttcacccctcccagtgtccagcctgtgtctcccccagcaattgtgtctaccagtctggctgctgacctggagggcctgacactcacagactccaccctggtaccgtcgcttctgagtccagtatcgggtgttgggcggcaggagctgctgcaccgggtaactggcgaggggctggctgtggactacaccttcagccgccaacctttctccggggatccccacatggtgtccgtgcacataca

SEQ ID NO: 34745 - DNA, 416 bp, Homo sapiens
gaagacatctacaagcttaggcatgatttgaaaaagacttcaataactcagcaacccagcaaacacaggacagatgaggagctccagccacctaccaccacagttgccaggtctggaacacccgcagtagaaaacaagcagcagattggggatgctattcggatgatagtcagagggactcttggcagctgtagcaccagcagtgaatgccttgaagacagtaccatgggaagtgttgcagacacagtggcaagggttcttcggggatgtctggaaaacatgccggaagctgattgcattcccaaagagcagctgagcacatcatttcagtgggtcaccaaatgggttgattactctaacaaatatggctttgggtaccagctctcagaccacaccgtcggtgtacttttcaacaa

SEQ ID NO: 34746 - DNA, 371 bp, Homo sapiens
gggtgtcatcagctcaggcctgctgaacctggctgaggatggggtgctgagacccctggcgcttacagagggtgggaagggttcctcgtccttcattacaccaatccaaggctaacaggggtccatcaccccagcggacaaggaggtcgtggaagccacggacagcatatagaagacgcggatggtgaggccttgcaaacccttgagtggggagaaatactcacccaaagagctgctggctctgctgaagggtgtggaggctgagattgcatactatgatgcgagcctcacggagcaggttaagaagaggaacaagctcaagactgatgaccagctaaggacccacgactacgacgagtgcatttgcacct

SEQ ID NO: 34747 - DNA, 504 bp, Homo sapiens
  misc_feature (1)...(504): n = A,T,C or G
ctgcgcccctttgaatgcatagcatccgaccangaccacgccaagcttggcacgagggagccggtacctgagagtagcagagagagttatcctagctgactttgctcttagggatttgcttctaaagcaatccttaggaaagaaagagcagtatccacaggagactggtgggcactggcttccccagaaaacctacctagatgaattctattctcaagggactcctatttagataaggggctttgttagttctcagagcaacacaaaacagatgtatatctcattacttgcccccacaacctttctgctctggccacatgggcctacccactgtctgctaaatgcacttcatattttcttgtttcagagcctcaggaatcataatcttcttttcctaatctctgcccctcacttacctggatcttttgtattctcaatgacctgctccatcccagccctttcaagaacctttaatacctaccaagtgaaaactctttccatttg

SEQ ID NO: 34748 - DNA, 419 bp, Homo sapiens
  misc_feature (1)...(419): n = A,T,C or G
ggccaccacatctgcaccaactacaacaacgtgtgccgcaagttcccccgagacatgaaggccatgtccccagaaaaccaggagtatttcgagaagcatcggtggccacctgtgtggtacctgaaggaggaagatcattaccagcgggcacggaaggagcgtgagaaggaggactacctccacctcaagcggcagcccaaacggcgttggctcttctggaacagtccatcctccccgtcttcctcggcagcctcctcctcatccccatcttcctcctcggctgtggtctgagatgctgccaccctcttctgaccctgctgctgttgtccccatccgccttcacccctctgctctttcgcatcaccccatccaccttacagggaccagggggcccacgtaaccaggacccagagggtggn

SEQ ID NO: 34749 - DNA, 419 bp, Homo sapiens
ggcacgagcaggaatcggctctggaaggtgaagctagaggaaccagacctcatcagcccaacatcaaagacaccatcggaacagcagcgcccgcagcacccaccccgcaccggcgactccatcttcatggccaccccctgcggcggacgggtgaccaccagccaccacatcatcccagagctgagctcctccagcgggatgacgccgtccccaccacctccctcttcttctttttcatccttctggctctttggttctgagctttcctgtctttccttttttctgagagagtcaaagcctccacgactctgtttcccccgtcccttctgaatttaatttgcactaagtcatttgcactgggtggagttgtggagacggccttgagtctcagtacgagtgtgcgtgagtgtgagccacct

SEQ ID NO: 34750 - DNA, 468 bp, Homo sapiens
  misc_feature (1)...(468): n = A,T,C or G
attganaacagtttgaccttgattaccccaagcttggcacgagggtttcctggaagtgtattcccctggggctcagcgatgctctgggaacccttggggtttggggaaggacagtgtggtgtgactattggcttgaaacgttatggatatggttggagtcacccatgtggatatgattttcagcttgtctgccagaagccttcccctgcaaggtgcccacctgcccggagacagagggagcagctgaggcctctctccactggccgccagcctccctagcacaaggggaccattcagcaatgagtgtttactcatgttctttcttgttgatgagttctgcggcccagcatatagaaatggctcagaacgttccaggccttggtgagacacagcagcgtccaatgctcacaggctgtccccactttgcctgttcccatcttcccctcgggacctgtttataaattgagg

SEQ ID NO: 34751 - DNA, 439 bp, Homo sapiens
ggataacgaggccctaaatggtctgcgccaggctccctcctcctaccctcccacctggcctcctgggcctgcacaccacagctgccaccagtccaacagcaacgggcaccgtctatgccccacccacgtgtatgcagccccagaaggcaaggcacctgccaacagtccccggcagggcaactcaaagaatgttctgctggcatgtcctatgaacatgtacccgcatggacgcagtgggcgaacggtgcaggagatctgggaggatttctccatgagcttcacgcccgctgtgcgggaggtggtagagtttgccaaacacatcccgggcttccgtgacctttctcagcatgaccaagtcaccctgcttaaggctggcacctttgaggtgctgatggtgcgctttgcttcgttgttcaacgtgaaggaccagacagtgatg

SEQ ID NO: 34752 - DNA, 415 bp, Homo sapiens
gggggcgccttgtgtatgacaactgtatgaaaatagtctcaaaaattaagacaatacttgagacacaaagcaacccattttccctgattttgcattctattacagggaaaataagtctctgatgcttcataaatactttaaaaagttcgggatggccttaaccatgcatagtctccaccaatcctttgaagcttccagcatctcaggctaaccatttcagctgtgaagaactgtaccctgtaatcagttatgctcatttatgtcctgtcttttctagatctgggagttttctgaccagggcctggtggttcattctgatgctagcaaggagtcccccttcaatgccgtctgaaccagtgtaactgatttcttcaccactcagggtagtcatatgcccccctagggcttttaagat

SEQ ID NO: 34753 - DNA, 506 bp, Homo sapiens
  misc_feature (1)...(506): n = A,T,C or G
gagagaggagccttcctatagatgagcgtggtgacttttgaaacgcatagccangcaccaggaaggacccttctcgacataggccttggggaacatttataactaatttctcaaaagcatctttaacaaaaacaaaaaattgacaagtgaaacctagttaaactaaagagcttctgcaaagcaaaaggaaaactattggccatgcaccatggcgtatggctggaattctagcactttggggggcaaggtgggtagattgcctgagcccaggagtttgagaccagcctgggcaacatggtgaaaccccactctctacaaaaaaatacaaaaaattatctgggcatctggtgtgcgcaggtagtcccagctacttgagaggctgaagtgggaggatcacctgaccctggaaaggttgaggctacagtgagccatgatcacaccactgctctccagtctaggtgacagagtgaaaccctgtctcaaaacaaataagaaactttcaacag

SEQ ID NO: 34754 - DNA, 426 bp, Homo sapiens
ggagcatctttatccactgaggctaatctcccctgcccctaaatggatttgttcatttcactgccattctttaaagttgtaatcaggccaggcacgggggctcatgcctgtaatcccagcactttgggaggctgaggcgggtggatcacttgaggtcaagagtttgagaccaccctggccaatgtggtgaaacaccgtctctactaaaaatacaaaaaattaccccggcatgggggcaggtgcctgtaatcccagctactagggaggctgaggcaagaaaatcgcttgaacctgggaggtggaggttgaagtgaacaaagaacgtggcactgcactctagcctgggcaactttagtgaaaaataaaaaaaaaaacaacttccgcccccaaaaaataacctgggcgggggtgtgggtgccctgaaac

SEQ ID NO: 34755 - DNA, 396 bp, Homo sapiens
ggcacgagccacagactcagagagaacccaccatggtgctgtctcctgccgacaagaccaacgtcaaggccgcctggggtaaggtcggcgcgcacgctggcgagtatggtgcggaggccctggagaggatgttcctgtccttccccaccaccaagacctactttccgcacttcgacctgagccacggctctgcccaggttaagggccacggcaagaaggtggccgacgcgctgaccaacgccgtggcgcacgtggacgacatgcccaacgcgctgttcgccctgagcgacctgcacgcgcacaagcttcgggtggacccggtcaacttcaagctcctaagccactgcctgctggtgaccctgtgcggccacctccccgccgagttgacccctgtgg

SEQ ID NO: 34756 - DNA, 409 bp, Homo sapiens
ggcaaaaacagggagggtcctcgaggaggacacaccacgggctcagccttttggggcgaacgaggatgaggcatctgatctattcgctaccgggactcctccaggctcccgagaggagtcgggacccttcggcttggggtcagctcagcctccctgccttgtcacattcgtctgcattagaaactactgaagaaataaaagttctttttctttgctacacactttggtacctatgaacctagaacttgaagtgactcctacttatcacgtaaatttttatgtctgatatcaaacacatcttagactccccagaatggaatttaaagatgttcagtgttgggtaacagattgccctaagcattgccacatattctgtctagtcactgctgattttctatgtgtttgctcc

SEQ ID NO: 34757 - DNA, 467 bp, Homo sapiens
  misc_feature (1)...(467): n = A,T,C or G
ntctgatnacactgatancnttttacgccacgcttggcacgaggtccagaataagaccaatggcatcaccccccgccggtggctgctgctgtgcatcccggggctggccaataccatcgtggagaaaattggggaggagttcctgactgacctgagccagctgaagaagctgctgccgctggtcagtgacgaggtgttcatcagggacgtggccaaggtcaaacaggagaacaagctcaagttctcggccttcctggagaaggagtacaaggtgaagatcaacccctcctccatgttcgacgtgcatgtgaagaggatccacgagtacaagcggcagctgctcaactgcctgcacgtcgtcaccctgtacaatcgaatcaagagagacccggccaaggcttttgtgcccaggactgttatgattgggggcaaggcagcgcccggttaccacatggtcaagctgatct

SEQ ID NO: 34758 - DNA, 383 bp, Homo sapiens
ggatttgactgctttctatgagcccacgcctcatcttcccctgtgcacatgtttacctgatacagcagtgctgcgtgttgtacatacttggaacaacaaactagaaatactgtacttctgtaccaacattgcctcctagcagagaagtgtgtgtgtgacaagccagttctacaggcattacctaggtgtgagactaaaagcttttcttattgacttaaatttggataacagcaaggtgtgaggggggtggtgggtatggtgtgtgcttggatgggaaagaaaaggctccactcacctataggagattatttttaagtggaatccatttaaactcaaaacagttatgaaaagcaaggtgaagaacatgaagctgtgtctgtatt

SEQ ID NO: 34759 - DNA, 416 bp, Homo sapiens
ggcaatttttacatatcagtaattgtttttataatttgtgggtttcatgaaacattgctatgcatttattaggaaaaactgaatttcccaacaggtgaactgaaaagttattttaactattatacataatcaagatcctgcctctacggaattagctaaacctaaaaatgtttgcattaatgaataaattcttcctgcattccttggcccagttctggagttggtgacctttatcacaattattattttaggcggccagtgaactgctgcttcagaagtccatagcccagctctgaactttctcgataaaatgccatcagttcacctttaaagacacacattcctttgaaatccacccagtgtttaaaaagcaacttggaaatttacacattagcattgtactttctagccctaat

SEQ ID NO: 34760 - DNA, 430 bp, Homo sapiens
ggattaccagcatgtgttggctgttgacccagaaaaggcggcccagatgaaatcccaggtgatgacacatctccacgtgattgaagaaaggaggaaccaaagcctctctctgctctacaaagtaccttatgtagcccaagaaattcaagaggaaattgatgagctccttcaggagcagcgtgcagatatggaccagttcactgcctcaatctcagagacccctgtggacgtccgggtgagctctgaggagagtgaggagatcccaccgttccaccccttccaccccttcccagccctacctgagaacgaaggatctggagtgggagagcaggatgggggactgatcggtgccgaagagaaagtgattaacagtaagaataaagtggatgaaaacatggtcattgacgagactctggatgttaaggaaatg

SEQ ID NO: 34761 - DNA, 463 bp, Homo sapiens
  misc_feature (1)...(463): n = A,T,C or G
agtagatnaacacttgagaccctgtttacgccaaccttggcacgaggattgctatctgaatctagaactctatctacatgatactgtatgctaaattgtatatagcaatatattaaaatcagtgccttatggtgaatccaaagtgattaaaaggaaacactgcttttcatttatgaatgcatgtttaagaaagaaaaatgtatttcatttttagattatataaatggtggtgaactttttactcatctttctcaaagagagcgtttcacagagcatgaggtgcagatttatgttggagagattgtgcttgccctcgaacatctccacaaggtaagactcttcatttttcaggtttcttttctgaagtctgttaactaaggtaataatggagctggaagagctaatgtttttacatgttattgtcttagtggagattatgaaagcatacttatagaacattacc

SEQ ID NO: 34762 - DNA, 435 bp, Homo sapiens
  misc_feature (1)...(435): n = A,T,C or G
ggctggacacacacagagcagagaccgccgtgtgaagatggaggcagagatcggagagatgctgccacacgccacaaatgcctggggctcccagaaactacacggagcctcccccagcggcttcagcaggagcatggctcggccaacactttgatcttggtcttccagcctccagaacggtgagtcgttttcctaaaattcccttttccactggtgtgtggtgcaagatgaggcacattttccatggatggtgaacagagggaggagccttttgatcacaaccaggtcaccccacttctaagccactgtgcctccagccccacaagactaangagagagagcgcancgtggtggagagtgagctgtgctgggaccattgtttccgtaacctcgttttctgtgtccagctgacacaccttcaaagtggcatcaggg

SEQ ID NO: 34763 - DNA, 430 bp, Homo sapiens
  misc_feature (1)...(430): n = A,T,C or G
gggtatggatagatcatggaaaccagattagagatagtaagcattagtaaacattgttctggagaacaggaacaggtgtaagttgtagaaatcctgaagagccagtcattcttttacagagtacattcttcttagcctctatggcgctggtctatgcccttcagtgaacagttgtataaacaataattataatttgcaaccttgtcttgtcaaccttgctgatccagctttttcttattattacaccttgtcttgcttattgcagcaaatattcaataacaacaatgtttctataagtccaacttcctttattaatgtttccatttagcctcaaaaatatcaaagtagntcctttttgatgttgttttcctgatttacttttcccataagttttaaataccatttctgccttgaagcctagaaattttcn

SEQ ID NO: 34764 - DNA, 403 bp, Homo sapiens
  misc_feature (1)...(403): n = A,T,C or G
ggcacgagctcatttgtattattattattatttttttgagtcacgggcttgctcttttttccatgctggagtgcagtggcatgatcttggctcactgcagcctccacctcctgagctcaagtgacccttccacctcagtctcttgagtagtcatttgtaaatatttacacgctgtaaatattaaaacagtaatcctgcttctccactaaagtcagctccttataaaatcagatgttggatgcaaactgggttagatgtgggctgcatctagtttatcagtcatgtatgtgaccaacatgcagagcaatcaaaataaactttgattaaaaagcttagctgggctgggtatagtggcttacgcctgtaatcccagcactttgngagaacaaggcgggcagatcan

SEQ ID NO: 34765 - DNA, 471 bp, Homo sapiens
  misc_feature (1)...(471): n = A,T,C or G
ggagggtgntttgaatacataacgtcttcacctgattacgccaagcttgtcacgagggaaagtatgaaacagatttgttaactgaactcttaattatttttttaaaatggttggtatatttcttttcttttttcttttatattacgggaagtgatgaaatttaaaatgacctctaacactcctgtaattgtcttttaaaatactgatatttttatttgttaataatactttgccctcagaaagattctgataccctgccttgacaacatgaaacttgaggctgctttggttcatgaatccaggtgttcccccggcagtcggcttcttcagtcgctccctggaggcaggtgggcactgcagaggatcactggaatccagatcgagcgcagttcatgcacaaggccccgttgatttaaaatattggatcttgctctgttagggtgtctaatccctttacacaagattgaagcc

SEQ ID NO: 34766 - DNA, 435 bp, Homo sapiens
gggttgtgaagaccatgacaggaggccgagcgcagagcattggcaggaggggcaaggtggaacagttatctccagaagaagaagagaaaaggagaatccgaagggaaaggaataagatggctgcagccaaatgccgcaaccggaggagggagctgactgatacactccaagcggagacagaccaactagaagatgagaagtctgctttgcagaccgagattgccaacctgctgaaggagaaggaaaaactagagatgatcctggcagctcaccgacctgcctgcaagatccctgatgacctgggcttcccagaagagatgtctgtggcttcccttgatctgactgggggcctgccagaggttgccaccccggagtctgaggaggccttcaccctgcctctcctcaatgaccctgagcccaagcccttagtggaac

SEQ ID NO: 34767 - DNA, 430 bp, Homo sapiens
ggtgaatatatagctaattatagcattttagaaaaaattagctctgcagatagtcaggccccatacttcttggctcattactgattttaataccttcatgagagtattaaggttgaaaggaatggtgaaatttgcattatcagaggtctgatatgtaatttattgtaaagaaattaaatatatagaggctcaattaaaaaataaccatattctcaaacctccattaccactaatatcttggggttgtcaatgatagactatatatatatatgtatgtatatgtgtatatatatatatatataattttttttttttgagacggagtcttgctctgtcacccaggctggagtacagctcacagcaacctctgcctcccaggttcaagcaattctgcctcagcctcccgagtagctggaattacagacgcctg

SEQ ID NO: 34768 - DNA, 481 bp, Homo sapiens
  misc_feature (1)...(481): n = A,T,C or G
aattgaatagcagtccngaccatcannacgccaagcttggcacgaggaagaaagaaagaaaaaagtaatgggaagtaatagtaaatgtggatccataaagaaaaacaaaggttaagaaaatgatgtatgtgaaagaaaaaaagctctataatcagtgtgtttctctcacctaaaacaccatttactaactacttggttcagatgtaccctttaactctattttgtccttgacttatatcaacactcttcttttccaaactcctatagctctccatctggaatgattctatggggtggggggtcgggggaggagaaagggagacagctgatgaaagaaagagagagaaagatatagagagagagagagatgggtggagacttggcctctctcctaaaggttcaaaggtagaatatgccactaacactatgtgcctttcaaactcccttctaggacatgctccatagtacttagatcttatag

SEQ ID NO: 34769 - DNA, 420 bp, Homo sapiens
ggagcttataggtctcctgttgcagtggaagaagtcgtctcctctggaaattcaaaaccttaggcctgtctatacttactttgggtacatttacattacgttatagtttgagaatcaccaaggtgaaattttaacattaaaactaaccccaaggcacctggtagaagcagcacagtataaatttctgcttacattctcaattgagacctaacagtgctcccactgaaaagagtccaactaaacttgaacccctgtgctgactttgcaaaatgagaccctcaatggctttagatattagagttattggctataaaatagctatgtttaagatttctaaagacctaaaagaaggaattaaaaacctgacaaaatactgtcttaaaagaacaaagttgaaaacaaatcacatagaaattacag

SEQ ID NO: 34770 - DNA, 495 bp, Homo sapiens
  misc_feature (1)...(495): n = A,T,C or G
ctgtnaaatgagaccgtcngaccaccattacgccaagcttggcacgaggaaacttggagagtccgatgaagactgatattttcgatgagttttttttctcctcagttttaaatgctttagcaaatgacacattacacctacctcatttcgatgaatatctgtttgagaattattgaattaatgcttgttaacttttttcatataatatttattattattagaagaacttacaatgtgttcaggtagtgtttatacactggacttgtgtaattacttgtgtaataaccatgaacaaaatgcaaggtttaacctttggttctgcccatgaagcatgtaatctttcttacacattaaaatcactgaatgtgttctcctttttggtttcattttgttcttgtgagagtatgaggatntcaaaatgttaaagatgaaaagtggcgtctagtttctgacagtttgtacagttggatgcattacatttttagatttgaagtt

SEQ ID NO: 34771 - DNA, 441 bp, Homo sapiens
ggactgccccatcccaccttacaacactctggcccctctgcttggtccccttttcccccaggcaggaggcaatcccaggggcctgcctgatagaggcatttcctgtccctgtctcctcctgcatctcctttatcctgcactgccaccctctattccccattctgtgttggactttgaaggccccaagcccagccaaagcactgagttcccccttaagacacctccacaccctccccacaagcaaagcacaaattttggggtccatgtagcatgggccacgtaggaggctcctgacttgccaggggcccagcctcagcatacccaccgagcagctgccagcctgggctgagggtgggcatgaggcaggagtcagcacttggacctagggatgtgaggttttctgtgccccaagtttgtgggaaggtgggcactactgctggc

SEQ ID NO: 34772 - DNA, 451 bp, Homo sapiens
gggcagagctcacgttgcattgaagacgaaacctcggggaggtcaggcgctgtctttccttccctccctgctcggcggctccaccacagttgcaacctgcagaggcccggagaacacaaccctcccgagaagcccaggtccagagccaaacccgtcactgaccccccagcccaggcgcccagccactccccaccgctaccatggccgaagacgcagacatgcgcaatgagctggaggagatgcagcgaagggctgaccagttggctgatgagtcgctggaaagcacccgtcgtatgctgcaactggttgaagagagtaaagatgctggtatcaggactttggttatgttggatgaacaaggagaacaactcgatcgtgtcgaagaaggcatgaaccatatcaaccaagacatgaaggaggctgagaaaaatttataagatttagggaaatg

SEQ ID NO: 34773 - DNA, 403 bp, Homo sapiens
ggataaaatgaccatggtactactacctgcttctgggattctggtaaggattaaatgtttgaacaaatgcatgtcaagtgcatagtgaattacctggaatattggtatgagctcaattaatgttggccattacaattaatgttggcagctactttgtcgagcctctgccttgtacgactccaggggcatcactcacagagagtacaatgtgtctggtgctccagggggcctttcactgtgagttctggatgactggcgccccctgcatttgtgcacaacagccctgtggacctgcatcgttctggaagaagggacagctgtctaagaatccgcaacagcccaaggaggtgatggtgaggcctgaacgggggtggaggccgtggggagaaaacctggggaacct

SEQ ID NO: 34774 - DNA, 441 bp, Homo sapiens
  misc_feature (1)...(441): n = A,T,C or G
ntttgatgagntacgtcggaccancantacgccaagcttggcacgagggtgccccatctcattctatactcacatcccatggaggggaggattttcacttcttttctctagacttggaagctgggattcagagaggaagcatcccttgtgcaagatcacatagtcaggaggtgacacagggctaaaacttgaaccaaggctctaagaggatttcttcttttgagagtctcttccctgtccatttctgtgactaaactgtgcagaggttgacagcagggcaaggtacattgatattcatcctttataggcttcctgctaaaaagcttttgagattgtggtcttccaaaaaaaataggagcttggttgaagtccccacattttcaagcactcacagttctgcctctggcaactgtgctaacaactcatagctgtactgggagt

SEQ ID NO: 34775 - DNA, 395 bp, Homo sapiens
ggaaaaagaaagctgtgaaattgaagtcccaatttaagagtcctgaggcagaacctggtggctggaggcattcccagaggtggggaagagagcctgcccggccggagaacatctgccttgctgcacctgaggcccagcagagccgttcctgggactgtcagataatcggtgcagcggtggaaggagcctgcggctgctggcacagacttcacacagcacctcctctctgctgggtttccacacagcctgtcttcagatcctgctgccgcgtgcgaccagaggtgggaggcccctggtggcatggaagagggagggtcagtgccaagtctcaggaggagggcgcatgtgtgtatcaccctcagctggcggaacctggctgcgaactgtgcagttac

SEQ ID NO: 34776 - DNA, 440 bp, Homo sapiens
ggtgatcagaagcatcttcctgttcttggaccgcacctatgtgctgcataactccacgctgccctccatctgggatatgggattagaactgtttagaacccatattattagtgataaaatggttcagagtaaaaccattgatggaatcctactgctgatcgagcgcgagaggagcggcgaggccgtggaccggagcctgttgcggagcctcctgggcatgctgtctgacctgcaggtgtataaagattcatttgaactgaaatttttggaagagactaattgcttatatgctgccgaaggccaaaggttaatgcaggaaagagaggttccagaatatcttaaccatgtaagtaaacgcttagaggaagagggagacagagtaatcacttacttggaccacagcacacagaaaccactgattgcttgtgtggagaaacagg

SEQ ID NO: 34777 - DNA, 497 bp, Homo sapiens
  misc_feature (1)...(497): n = A,T,C or G
aggccgggccgcgcgataggagtacgtcactctcgcaancancantacgccaagctgggcacgagggtgtgatattaacaaacttattaacacctgttgacaaatatctttgaagacaaatctacacgcaagcttttgccttagcgaacaacaggaatagtttccttaaaaggatacagctattttgaaatttcctcaaccattgcatcccagtgggggggatacttacatggtaggactgtttggccaaagtgcttgaagcattaggacacaacaaagatagttttgaaatgttttcttgctcaaaatacatttgttcttaggacacggctagtgctcattttacattccatgcctgaagtgtttaaaacactgtggtacaggtttctgattctgtgttggtcaattttgaaatccatgtgttagtaagaagtgtgctgattcgtagagtgggtaacttctgggaactcccctttcttttattgacaatttctttg

SEQ ID NO: 34778 - DNA, 405 bp, Homo sapiens
ggcaggaaaatgtgatgcgccacaggtatcagcgtctggatcgccacttcacgttttagccacaagtgactcagtggaagatccagagtcaacagaggctcgtcaggaagatgtctacagaaaaggtagaccaaaaggaggaagctggggaaaaagaggtgtgcggagaccagatcaaaggaccggacaaagaggaggaaccaccagctgctgcatcccatggccaggggtggcgtccaggtggcagagcagctaggaacgcaaggcctgaacctggggccagacaccctgctctcccggccatggtcaacgaccctccagtacctgccttactgtgggcccaggaggtgggccaagtcttggcaggccgtgcccgcaggctgctgctgcagtttggggtgctct

SEQ ID NO: 34779 - DNA, 404 bp, Homo sapiens
  misc_feature (1)...(404): n = A,T,C or G
ggcaggaaaatgtgatgcgccacaggtatcagcgtctggatcgccacttcacgttttatccacaagtgactcagtggaagatccagagtcaacagaggctcgtcaggaagatgtctacagaaaaggtagaccaaaaggaggaagctggggaaaaagaggtgtgcggagaccagatcaaaggaccggacaaagaggaggaaccaccagctgctgcatcccatggccaggggtggcgtccaggtggcagagcagctaggaacgcaaggcctgaacctggggccagacaccctgctctcccggccatggtcaacgaccctccagtacctgccttactgtgggcccaggaggtgggccaagtcttggcaggccgtgcccgcangctgctgctgcagtttggggtgctc

SEQ ID NO: 34780 - DNA, 400 bp, Homo sapiens
ggggcaaagggctctgaacagggcttccattcacctccagcaaggaatagttcagtaaccattaacacagcacccttgcgagccatgcagacagaatttaacgctaatgcgcctctgcctccacgaaaagaacaagaaatgaaagaatgcccttattcacctggctacaatgaaagttttaccacagcatgtacacaaacaccaccccagtgccaactgccatctatacatgtggaacaaactgtccattctgaaaagactgcaaattatcattctgatggaactattcatgtaagcaatgggagccttgccttttacccagcacagacgaatgtatttcccagacctactcatgcatttgtgaatagccggggatcggctagaagatgtactcagggtg

SEQ ID NO: 34781 - DNA, 451 bp, Homo sapiens
ggtgggaaccgcagcgccagctgggatggggcggctccatttttggttccaaattatgatttgtgaaatcaagcaaatgtattttgaaaatgaaaagaaaaagggacagcaagccaacatgcctcaaaaaggctttcggcctccatcaaaccaaacggccgggcggcaagttcactaagaacagcacatcagaaagcacgagtggcttctcctgcctctggggacgctgtagggcacaggccccaaagcggggtcccctcacataccggatgtgattggcctctgtcgaagttggggccctcagtctactcgcccagcggagggagaggctgctctgctgccacgtggccacatcctctctagcagacaccacgagcagttccgagttcttcccaagcgctctgaaagggtgcaccagagtggaacctgaattccaagtgcgacaggacag

SEQ ID NO: 34782 - DNA, 410 bp, Homo sapiens
cggaggactacagccacgcgactgagaaaagatcaatacagtattcactctagaaacaattatctttttctcttaaagattttgtgtgcatctttaatctttcaagccaaattacagctatttcaggtttcctgtgttagcttggggataggatggtggctggagacaggcaggcttctctgccctgggaagagcccactcagcttaattgctctgccatcgtaaagcctggttggacttggcttcctgaaaactcccactgatagtgcctgttagatctcctgtttgtttcagttggcagaacatttactggccccaactgtggcatcatcctctcagcagtcttcctgtcacccgcctggcaggcagaaagagctgcagtcccacgtgggcctgcctgggggggtggg

SEQ ID NO: 34783 - DNA, 440 bp, Homo sapiens
gggtgaaactgaagagtcgcttttcttggtttcctttttagaaggttttttccttaatgtgaaagtaatttgaccaagttataatgcatttttgtttttaacaaatcccctccttaaacggagctataaggtggccaaatctgagaacaattaaattcattttagttataataaatttaatatttgtaaatgtaacatagtttcagtgtgatttctagagctaattcaaaatagtattgatatattttatgtgactgcatttttggggaggggtaccgaaatcgttaaatttgttagtttgcaaaaatatcaatctttaatgggagaattttcaatttgccaattttttccttgaatgggtttaagtatgctacaatatacagttcaggcaaaatttaagatgtaattatcttcaatacttaagtgtgcttgctttctaa

SEQ ID NO: 34784 - DNA, 442 bp, Homo sapiens
  misc_feature (1)...(442): n = A,T,C or G
cattgattacagtcccgaccancannacgccaagcttggcacgagggggagcgattcctcctctggtggctctttttaaagggaaacaaattagtgtccaaatgaaaggtgcaatggctgtggaatcactggcaagtcacaacgctcttatacagaaagcatttctggaaaaatcgttaactaaatatcttttaaaactcctaaaggtaggaattttatgattactggtcatttttcttagatgatgttttctattttgaattgttaagtgaatagaaaaactaaaccaattctagaataaacattttataaaatatgcattcctaaaatgttcaataaatgttcactgaattaatgaaatatttttaaaaataggcatttcaaatagatgttaaggaacaaggagctgttgcactttgggccttggcaggacaaacactan

SEQ ID NO: 34785 - DNA, 416 bp, Homo sapiens
  misc_feature (1)...(416): n = A,T,C or G
ggggaataaatctcatggccttctttacctggcctccttagtggtggcccagcaggaagcgggggttagagcaggagccactcagccttccaagatagatactccatgggccggtggtattactggccttttgagcccatccccatttgcatagatgatccacgtgggttatcatctggctggtatgttcccagagtgaaactcagcagccccttgagggaggggatggtggccatcaggccaaagtattgcaagatagtttggatcatttgctaagcagcttgtggtgccttcagaaaggaacagtttcaaagaactttcacatctgttggctcatttcgccctaatgacagacttctctttgatatttgcatggcattaaattttgcctttcttgttttctccagaaaacgccn

SEQ ID NO: 34786 - DNA, 488 bp, Homo sapiens
  misc_feature (1)...(488): n = A,T,C or G
tggagccccccnattgaaaccgttatgatagagaatcctctcagcttggcacgaggtggcacgaggagagagttgtgcatgctaaaggagcaggggcctttggctactttgaggtcacacatgacattaccaaatactccaaggcaaaggtatttgagcatattggaaagaagactcccatcgcagttcggttctccactgttgctggagaatcgggttcagctgacacagttcgggaccctcgtgggtttgcagtgaaattttacacagaagatggtaactgggatctcgttggaaataacacccccattttcttcatcagggatcccatattgtttccatcttttatccacagccaaaagagaaatcctcagacacatctgaaggatccggacatggtctgggacttctggagcctacgtcctgagtctctgcatcaggtttctttcttgttcagtgatcgggggattccagatggacatcgccac

SEQ ID NO: 34787 - DNA, 405 bp, Homo sapiens
  misc_feature (1)...(405): n = A,T,C or G
ggcaggatctgtttttgctgttttaatcataaatagactagttagtagaagacttttgaagaacaaagtaaaacttttttttttcattaaaagatgtcccagaggaaaggccctgtgcagccagtatattctaatgactgcctggaccatgtcctaatatgggggttttaagttgttggccaaaatcctttaaagacatacgaaacatctgccaactttttagcgaacttaacaggtttcactgacgttttcctcaatttttgaatttaggggggatttgctttcatgtcctgtttcaaaaaccaagtgtctcttgacagcccactgggtcttcctgtcctcttgctctagnctgtatcaaaaagcagaatgactgtacttttgttttacaaacaaccacctgan

SEQ ID NO: 34788 - DNA, 413 bp, Homo sapiens
  misc_feature (1)...(413): n = A,T,C or G
ggccctaatgacataaacgcagcctttcttgctgtctgagaccaaatgtctagttggtagacaggtggatgtttggcctcctaagggcacacttctgatcctgggccccaggtggagaatctctggcatgtggcttggctttgttgagactccaaattccattatcttcatgacattcggcctcatccatagggtcctgaagctgcagtccacagctcaaaaaggagaggcgagacctccctccaacctggtgccacaggtgtctcccaagccacatccagcctggatgacctgggaccccaaaaactgtcgtttgggaggcagcaacagcaacgtgcccaggcaggcagttattcccacagagtgagccacaattgtagcagggcacttgaatgcatagctgatgatttgan

SEQ ID NO: 34789 - DNA, 473 bp, Homo sapiens
  misc_feature (1)...(473): n = A,T,C or G
agcggggnnattgatagagatcgttatgaccatgaccacgctcagcttggcgcgagggtactgataggtacctgagattttttaaatgaggttaaaacattgttacccactgccctgagtgtactttttctagttgggtaatttggaacctcctccacagagtttctcaatccgggctagataaaatgtgctaccacatttaaaggggtttcatttacgtttcatgtactggttttcataagttagtggtcagggcagtgatcatagtaaaatactaaatgggcgtctggggcatttgggaatgacccaacgcattatccctgggtttcactggcttgctggggctgggccacccttacggcaactggaagaaacagctttgtcaagacagcccagtttctccggcctcctgaaatcttgagacaggtgagggaatgcaatttaggggtttctgagaataaggatgtattgtt

SEQ ID NO: 34790 - DNA, 411 bp, Homo sapiens
ggccagcacatcgcagcagccagtaaggaaagggctcgcccctgcccccgggggcccctctgataagcaggggtgcaggcaaggagggaggccccggcgacagggccgcccacgcggactttctgcccgcagaggagggggcacacgggatggcggctcccacgggtctcctctcatagctccgcttcccacctacccgcaccctccctcgggtctgttccccttgggtgcactccccttagcgcggcctaggcaccaaggagctgctctcggcagtgttcacgagatacaatgaattgaccagatctgtcataactgatggccggtccttcagaagctcattccagtcgccccacttcccactactgcctttgggttccctcaccactccactggagagcccaggccact

SEQ ID NO: 34791 - DNA, 423 bp, Homo sapiens
  misc_feature (1)...(423): n = A,T,C or G
ggtcccaggtgatggatgtctaatgctcaggaaaggcgagtcagtctctgaggcaacagatcccatgggcctgggtagaaaatgcccagtgcttcccagtcccaagtgctggctttccctgtatctgcctctgccaggcaacacttatcaggctcccaatcagcaggagcctccatgctccactttgaacagcctctatgctccagcaatggggcatttgtgaagagtgacttgattaacttttctgaccatgggtataatacagttgcttcagagggcagtggttctgggtgtgatttttacactgtaacattgtatacagggacatggataattactatttttttctggccattaacactcacctactctagtactaggatttcagaccaaggtcctcatgacgcctggatattttagtan

SEQ ID NO: 34792 - DNA, 502 bp, Homo sapiens
  misc_feature (1)...(502): n = A,T,C or G
ctgggncttganaacgattggagcatcattacgccaagcttggcacgaggggagatgatggctgatgaagaggaagaagtcaagccgatcttgcagaaattgcaggaactcgtggatcagctctactcatttcgagactgctatttcgagacacatagtgttgaggatgctgggaggaagcaacaggatgtgcggaaggagatggagaaaaccctacagcagatggaagaagtagtgggttctgtccagggcaaggcacaagttctaatgctaactgggaaagcactaaatgtgactcctgactatagccctaaggctgaggagcttctgtcaaaggctgtgaagctggagcccgagctggtggaagcctggaaccagctgggtgaggtgtactggaaaaaaggggatgttgcagctgcccacacctgcttctcaggagccctcacccattgcaggaacaaagtctccttgcanaacctgtcaatggtgcttcgtcagctgg

SEQ ID NO: 34793 - DNA, 419 bp, Homo sapiens
ggaataaataatttttatgataaaagggtatactgataacaacattgactcctttagttcaattcagtgcataatagttgaacacccactagtccctgggacccacacagggcgtgtggtcattgcttttaaggagttcatagtctaagttgatgagataccttatattttcacaaagcactttgatttgataaagcactacagaatgtgcttgagaaatatattggagaatatgtccatggctctaacttctgagagttcagcccgtggcagcaagatgcataccttgaagcttcctgcagattgtggaaagcataggggttgtaaatgaaactctctaatgaagaaaaaaaattaaatgaaactgggcaaacagctttccccctttgttctaggaaaatttctagggtgtcttcctt

SEQ ID NO: 34794 - DNA, 401 bp, Homo sapiens
ggcacgagattaggaatagtctgtttttctttcctgaagatcagtttttttattcaaacacatttcaaagaaccaaattttttttttctttaaggaaaaaggagctttttttcaagggaaaggtattcatttgtaatactttggtttaaggcatactttaatttttacgagtttcagaaacagaatttttgtactagggaattcattggtgagagtggtcttttaacctcagaatgtcaaattttggtcttgaaccacagacatccaattacagaaagaatataagcaatctcacaggcctgcaatcggacactgtctctgtgtggttcataggagatgatttttgaggtttgcactcatgcaatttgagaacaccgttgacaagaaagctgagtttacat

SEQ ID NO: 34795 - DNA, 472 bp, Homo sapiens
  misc_feature (1)...(472): n = A,T,C or G
ggaggggggnttttggatgattaccctctngaaacgccaagcttggcacgaggatcaaaataagcatagttactgttttctgtacggctaagtactgcctaatgtatgaaagaagtttggtgcttcaattatttatgagctcagaactcaattcattaaaggtattttgccaagtcatgccaagatatattgaaatttccactcatattggtttttaaaattttttttagtcctaaaattaataagtatggaaaatcactaaaagcagtgtaggataaggcgtgagccactgcgcccagccaattttactgtatttttaaatgccatgacatacctcaaaattatcctttttatggtactattttctcttggtctttcattaattattggccttgataccaatttctaggctaaattggttactttcttttaaaaaatttaaaaatagatgaataaccacttgtttcatggt

SEQ ID NO: 34796 - DNA, 401 bp, Homo sapiens
gggtttttagaaaattttcaaattccaacaaacataagataagacatactggagagaaaccctttaaatgtacagaatgtggcagatcgttttacatgttacacctaactcaacatacaggaattcatgctggagagaaaccctacaaatgtgaaaaatgtggcgaagcctttaataggccctcatcacttaatcaacataagagaattcatactggagagaaaccctacacatgtgaagaatgtggcaaagcctttaaacggtccacagttctgaacgaacataagaaaattcatactggagagaaaccctacatatgtgaagaatgtggcaaagcctttacatagtccacaacactgcatgaacacaagaaaatttatactggagagaaaccctacaag

SEQ ID NO: 34797 - DNA, 471 bp, Homo sapiens
  misc_feature (1)...(471): n = A,T,C or G
agggcgcgggncccgccctganaatcatgaacacgcttgacgccagcttggcacgagggttaaatgaattggaaacatactgtacaagaaatgacatagtaaacatgctagttggaaataaaatcgataaggaaaatcgtgaagtcgatagaaatgaaggcctgaaatttgcacgaaagcattccatgttatttatagaggcaagtgcaaaaacctgtgatggtgtacaatgtgcctttgaagaacttgttgaaaagatcattcagacccctggactgtgggaaagtgagaaccagaataaaggagtcaaactgtcacacagggaagaaggccaaggaggaggagcctgtggtggttattgctctgtgttataaactctgggaaattccatctcttgcatatttgatcagatagtgacatctttctgtatataaactctttaactgctattttagggaccttgcagtttgn

SEQ ID NO: 34798 - DNA, 418 bp, Homo sapiens
ggaccgtgtgagctccgcctccccacagagcattactgagggagctttgcctcccgtcacagcattaccgtgtgaggtccgcctcccctcagagcattactgtgggagctacgcctcccgacacagcattaccgtgtgagctccgcctcccgacagaacattaccgtgtgagctccgcctcccgtcacagcattaccgtgtgagctccgcctcccgacagagcattaccgggtgagctccgcctcctgaccaagcattactgggtgagatccgccccctgggatatcattactgggcgagctccgcctcctgccagatgaccggaggcattatagtctgatatgagtggaaccctgttttgaactgcgcatgcgaacgatctatgttatgcccccgttatgataatctaatgctgctc

SEQ ID NO: 34799 - DNA, 416 bp, Homo sapiens
ggcaaaaatggtgaagggaccggccaggatgtgctccttgacttactgaggacgttggccatcagaattcaggccatccacttgtcgtcttccaaaggttccgtggtatgaaacgcctagtgcagggaatgcttcccgggaactttccagttctcctgccgcattggctttacacaaacacagacaaattccacctggcacctgtttttggctgggccaaggagctgcctctactgctcccacgtgttcctgttgaaaaacaaaggactttccactggtctgcagatcagatcagctgggtccagagtttaatgggcaactggacaaccaagttaaccccaattgaaagcacccctaggaccattgaacacccactgccggggaccactgtccagtgaatggattgaggccttttg

SEQ ID NO: 34800 - DNA, 499 bp, Homo sapiens
  misc_feature (1)...(499): n = A,T,C or G
naattgaaaaccgttatgaccatgtagacgcacatcttggcacgaggaagaggtagccgcagaaaggcagctcagcgctctgcaccttccagagccacggccctggtgggcacgggggcacctgggcatcctcaggcttcccctggggctgcgagcgctgaaaatggaggcacgcacttacctccagctaaggggctactctccgacaagaagcctacaccccagcgggtgataaagctgaagaggactccgctgtgcgccaccgcgccttccctgccctcccccacggccacgaggcaggccaactccctcaagccgcttcccggcgaagctgcccgtgccttgggagtgcggactgagaacgggaagaacaagggaaattgatgaaagtggtggacttgaaatttcccgttcatctcccaaagctttcaacccattcgacgcanagaagtgacactntcttaatgcagcagaggggaagcttatgtttatgttgagg

SEQ ID NO: 34801 - DNA, 436 bp, Homo sapiens
ggggaccagatcctgtcggtcaacggtgtggacctccgaaatgccagccatgagcaggctgccattgccctgaagaatgcgggtcagacggtcacgatcatcgctcagtataaaccagaagagtacagccgattcgaggccaagatccacgaccttcgggaacagctcatgaacagcagcctgggctcagggactgcgtccctgcggagcaaccccaaaaggggtttctacatcagggccctgtttgattacgacaagaccaaggactgcggcttcctgagccaggccctgagcttccgctttggggatgtgctgcatgtcatcgatgctagtgatgaggagtggtggcaggcacggcgggtccactctgacagtgagaccgacgacattgggttcatccccagcaaacggcgggttgagcgacgagagtggtcat

SEQ ID NO: 34802 - DNA, 403 bp, Homo sapiens
  misc_feature (1)...(403): n = A,T,C or G
ggcacgagctcatttgtattattattattatttttttgagtcacggccttgctcttttttccatgctggagtgcagaggcatgatcttggctcactgcagcctccacctcctgagctcaagtgacccttccacctcagtctcttgaggagtcattcgtaaatatttacacgctgtaaatattaaaacaggaatcctgcttgtccactaaagtcagctccttataaaaacacatgatggatgcaaactgggataaatgagggctgcatctagcttatcagtcatgtatgtgaccaacatgcagagcaatcaaaataaactttgattaaaaagcttaactgggctgggtataaaggcttacgcctgtaatcccagcactttgggagaacaaggcgggcagatcan

SEQ ID NO: 34803 - DNA, 420 bp, Homo sapiens
ggcacgagctacgccgagtgacagagacgctcaggctgtgttctcaggatgaccgagtgggagacagcagcaccagcggtggcagagaccccagacatcaagctctttgggaagtggagcaccgatgatgtgcagatcaatgacatttccctgcaggattacattgcagtgaaggagaagtatgccaagtacctgcctcacagtgcagggcggtatgccgccaaacgcttccgcaaagctcagtgtcccattgtggagcgcctcactaactccatgatgatgcacggccgcaacaacggcaagaagctcatgactgtgcgcatcgtcaagcatgccttcgagatcatacacctgctcacaggcgagaaccctctgcaggtcctggtgaacgccatcatcaacagtggtccccgggaggag

SEQ ID NO: 34804 - DNA, 396 bp, Homo sapiens
ggccgtgcctgactcaaagtctcctattgaaaaagttttgtctcctttacgcagcccgcccctcattggatccgagtctgcttatgaaagttttctaagtgctgatgacaaggcttctggcagaggtgccgaaagtccttttgaagaaaagagtggaaaacaaggctctccagaccaagtaagtccagtttctgaaatgacttctactagtctttaccaagacaaacaggaagggaaaagcacagactttgcaccaataaaagaagactttggccaagaaaagaaaactgatgatgttgaagccatgagttctcaaccagcactggctctggatgaaaggaaattaggagatgtttctcccacacaaatagatgtcagtcagtttggatcttttaa

SEQ ID NO: 34805 - DNA, 446 bp, Homo sapiens
  misc_feature (1)...(446): n = A,T,C or G
ggaatttgtgaacctgcttcctgatgaattctcccttgttcccccttggctctgccattatttcgttttcagtgtaatttgccaagccgcagttttctgtgctggctgtgcctctagtcgcagctctgtgactgattccctcccgggtgctgagtcccctccccggccaccatcctgcgtgaatatcctgaaattcatgggcttcctcgggggcccgcccgcaggtggtgctgggtgggttccgccaccttctcctggaaggtgagccttttcctggccaagggcagctgccttaacctctgagagtctgcgcttggccttagtcctggagacccancctccacggactgaaccgtgctgctgttgggagccaagaccggccctttggagccggcagcccaggggtccctgctggatcagagaaataaaagcacccgaagacggtn

SEQ ID NO: 34806 - DNA, 395 bp, Homo sapiens
gggcccagccactccaagccccctggcagctgcccctcctggagcagaaagtgcctttatctcagccatccgcagactgctcggccagatgcggggacaggctggaatgagggaggcgtcttcatctccctgccatccccctctcacgccacccccgcccccaccgggctgcaggtgctgctgatgcgctgggatctgattgaggataaaaaggaaggagagatgacccctaccccctcatcccccagttttgaaaaggtctaagcaagtgagtctggtggaggagctgagggagggagccatggaaggtgccagaaggaaggttggcgggggcacgtgtgggccgtggcttgggctggtcaaagtggcgtgagctgccccgcgcctgccctgcc

SEQ ID NO: 34807 - DNA, 462 bp, Homo sapiens
  misc_feature (1)...(462): n = A,T,C or G
gaaaaaaatttgaaacccttcctganaacgtaggacctgctacgccagcttggcacgagggtaatgaatgtggacaaacctttggtcacactttttcccttaataagcatcagaggactcattctggagaaaagccctatgaatgccgggaatgtgggagaaccttcagccagagctcatcactcattgtgcattacagatttcatactggagagaaaccttacaaatgtaataaatgcgggagagccttcacccagagcttatgtctcactcaacattacagatttcacactggagagaaaccctacaaatgtaatgagtgtggaagggcctttgctgatactgcataccttattaaacatcagaaaagggatgctggaaaaaaaaccctataaatccagggaatatagaatggctttcagctggagagcctacatcactggaacttaaagaattcatata

SEQ ID NO: 34808 - DNA, 486 bp, Homo sapiens
caagagagcccttgattgagagccctccgagcttggcacgagggctggtttttcaagctgcctcacaaggatggtaatagctgtaatgtgggaagcccctttgccaaggacttcctgcccaagatggaggatggcaccctgcaggctggcccaggaggtgccagtgggccccgtgctctggaaatcaacaaaatgatttctttctggaggaacgcccataaacgtatcagctcccagatggtggtgtggctgcccaggtcagctctgccccgtgctgtgatcaggcaccccgactatgatgaggaaggcctctatggggccatcctgccccaagtggtgactgccggcaccatcactcgccgggctgtggagcccacatggctcaccgccagcaatgcccggcctgaccgagtaggcagtgagttgaaagccatggtgcaggccccacctggctacacccttgtgggtgctgatgtggactcccaa

SEQ ID NO: 34809 - DNA, 487 bp, Homo sapiens
  misc_feature (1)...(487): n = A,T,C or G
nattgagagccntctgatcgtgattccgctcagcttggcacgaggcagaaaaagggaaatgaagtttgggctacttataggagtgaaaataaactctgtgatgtgccagcaccagcacaggctcttgtaggttcctcccaactttgggctcagtggtatcatgttggtggccagtttaggagtatttatatcacaaaatccacaagtgctgcaaatcaaggcttttctattctagaatgctggttgataaataatagcctcaacatttaccagaacactataaaacaattcagtgatcataaagttattatccacagtggaccagctcgagtctcaagtggacaatgttatcttacagactggagagagtgctagtgaatgcttttgtcttcaatgcccatctcttggaaatattgaaggtggagtagcaaccgggcattatattatctcttggaaaaggacctcagcaatggagaatatccccatc

SEQ ID NO: 34810 - DNA, 420 bp, Homo sapiens
  misc_feature (1)...(420): n = A,T,C or G
ggcgctgctcttcctgctcctctgggggcccaacgtcgtgactggagaaacaacnnancnacntnctgggcaatacaccatgtaatacatgtgaaaagctttgaccaccgccaatgagactctacaatggtgggtattattatggggaactgcaaagggcagagaacgggggttgggagcatccatacgccatctctatgttgcccatgaacgcaaagcggggctgatcggacaaaccacaggcaaccccaggactggacactctctatggcaactaatattctggaggctgggagtggggcatatcacagaccttctccatctaggagcacccactcccactcttttgacctcatttgctgtaagggggtaccataaaagctttttgaggccagagcacaccaaatacctgtgactacg

SEQ ID NO: 34811 - DNA, 459 bp, Homo sapiens
  misc_feature (1)...(459): n = A,T,C or G
gaaaaacacctgataccntnatganaacatggcnagcttcgcacgaggagagagcgagctgagtggttgtgtggtcgcgtctcggaaaccggtttcgcttgcagcatggctgaccaactgactgaagagcagattgcagaattcaaagaagctttttcactatttgacaaagatggtgatggaactataacaacaaaggaattgggaactgtaatgagatctcttgggcagaatcccacagaagcagagttacaggacatgattaatgaagtagatgctgatggtaatggcacaattgacttccctgaatttctgacaatgatggcaagaaaaatgaaagacacagaccgcgaagaagaaattagagaagcattccgtgtgtttgataaggatggcaatggctatattagtgctgcagaacttcgccatgtgatgacaaaccttggagagaagttaaca

SEQ ID NO: 34812 - DNA, 463 bp, Homo sapiens
agaaagacctttgaaacccttcctgagaccgtcggacctcatacgccagcttggcacgaggcctcgtgccagtaaagtaattccaaaaattaaataagaatacacattgttcagttgctaagaaaaatgcattctaacagtacaaatgaagtccagagtcagatcttttctcaaaatacttggcatatcaacacattacacataaacaaataaaaaccagtcctgtccctcatgataatgggtttctaatgggatgtattcttgcaatctgaaacaccttataaagctgtattttcctgattgatgttggaaaaagcattcccaaaatgtgaattattggttttatgaatagttacagaggatgtgatgacaatatgccagataatctatgtaattctttattcctggatacaagcacatggtggactgttttctcacaaccgattaaaattggatttatttt

SEQ ID NO: 34813 - DNA, 421 bp, Homo sapiens
  misc_feature (1)...(421): n = A,T,C or G
gggctttgttccctggaccaagttccactgcgttgactcctgcctgtgcgcttctgtgttcctgctgacaccccctgtcactctccctgccacctgcattacggaggacccagtgctcacctgcctctcacccaggatctcaagcacttgagagcagaggctggcctcctgcagccttgtccaagaccctcccacccaagacacagacgatgctctcaccaggtccccgctgggcttgactgctttattttactcttggaaacagcttcttaatgtgttggacataagtagccaagacaccaagggaggtcatggtctcttggcagaaaggcttccttgtgccatggctctcttaggcatagaaagctgtctcatcaaactcagtggcaaatctttttgcaactacctgttgccagcctan

SEQ ID NO: 34814 - DNA, 410 bp, Homo sapiens
ggtctgtctgaaaatctctgagaaatggggagcttatgatctcatgcatgttctgttgttaggtgttaagtgttgagtcaaaaatcctaatagtagtaccccaccagtccttgttgagccatctggagctggaagcatgagttagtcctgccacaataaaatcatctttactgtcaagacaaaactaaaattatatataaaagagatgattacaaaaaaagattgggtgcacctgatactactacattagctatatgccatgtggtgaacacccttttgagtaaatggtttctgtcaacagggatgttaaagacagaatcagttataccccccaccccctgagatgccgtaaagctacagctccttaaagagttgttcagtaaccagggaagaaaatgagtgaaccagca

SEQ ID NO: 34815 - DNA, 497 bp, Homo sapiens
  misc_feature (1)...(497): n = A,T,C or G
tgtgcgagggnaacantttgatanccntatgattttganaccgtcttcatggcacgaggagngcgttttgggaacagggtgagagcatagcatgctcatattatatattcattttaccacttagatttgaattgaggcatctcttagaatagggtttattttgtgcataccctcagaggacattgtccctctcatagaaacagatattcaaacatgtaatctgctattttattttaaggtaatagatttttatgattactgtttggaaaaaaaaaaagcaactataggttagcagttgctccaaaatctccaaaacaagcttaggagatttttattctttaccaaaaatgaaatggcttgggaggaaggtgtgtgcattacacacaggttgctctgggggcactgctccttcatactgngtttctgcctctgcctgaacccaaacccctcccagcctgacagaaatgttcgcttacgcagctagccctgcctcagtg

SEQ ID NO: 34816 - DNA, 412 bp, Homo sapiens
ggctgtcatttgactgctgcttttaatctatatattccatggggtttcttttttacatatcaactgccggccatttggggagaagattatcaactgcttactccccaatgcagagggaggccatgagaattctggacacccaatgagaacgcacaccttttcaggaactcttactcaggtacggcatactctttggataccaactgacatcaacaaaaaaaatgagggcttttcagggctgagctttgacaaattacctgaagcaatcttgatgctcgacatatttctaacaagggcagcctggtgagttattctcctacatttgtacgatattactatggaacgaatgtggatcatctcccctacaaaaactctggacaatacttattacatgtgacctgagtttactcaa

SEQ ID NO: 34817 - DNA, 427 bp, Homo sapiens
ggcggggacactgtgaatgtcagcccagaaggtgatcagagcctgttaattaaaatggaaagaagacagaagggaaggtagacatcaggttctccctggagacttttcgttttcatttacgctgcggaaactgacgtttttgcctaacaccccatgtaatgtaaacgtataggcttgagtacgtgtccggccgcatgtgtagtgaaccctaaagctttcctaattgtagttagcatcgtccctaagcggaacgattttccgtgaacatgatttgtacttttctacgagccgtacagtatacggagaagctgcacaggtcctcggcaaagcgattgcttttgccatacatcgtgcttaacaaagcgtgcttgaagactgagcccagtttgagatgtgggcttcaatatcaaaagaaaacgctgcgacc

SEQ ID NO: 34818 - DNA, 494 bp, Homo sapiens
  misc_feature (1)...(494): n = A,T,C or G
natagaaaactgtttgaccatgtagacgcacagcttggcacgaggtggaaattgtctctatttttggaaagtacttaaaagttaccagaattttcaatggaaaatgaggggtttctccccactgatattttacatagaggcataatttatatgtcttataaattataagtcttatataatttataagtctcccacaatcttccagttcttacccagtgtcagataattaattactaattactttcttaaaaacatgaactatgccagaataaaaaatatctatgtttgtatatttttataactcctttcagtcctctggggctcctgtcattgagggaagtcgttacgcctttcactgccacagttacagctcaagtgcttacacttcaagagggaggacgctgggggcccctggggctgctagtgccatcgtggtgtgtggcaggtgggccatcccatgtccctccagggggaccccacagcctggcagatgn

SEQ ID NO: 34819 - DNA, 419 bp, Homo sapiens
ggcctagtcgccacaaaaacatgcccctgactcagagcctctgcttatctgcaacatggtaatcagaactacctggcatcttgctgatcaaaaacttcaataggggccactatgcttcgcttcatccaacaattttctcaagcctcttctatgatactgaagtactctttcccagcgggactcttaaccagcagaacggatatactttctctcaagatgtctctccaccacaacttttccccgtgtacaaggcctcggctttcctcatcattttcagcggatatgagcaagacacaatgctatcatactttcccctgcagctctgaaaagcaccagaagcaagcacttctagccagactctcaagcaccatcacttacctaactgacagcccaaagccagcattatgtgtaactctggc

SEQ ID NO: 34820 - DNA, 452 bp, Homo sapiens
  misc_feature (1)...(452): n = A,T,C or G
ntttgacacatcgtgacagcttgacctgattacgcccagcttggcacgaggcgcctctgttcaggacactgggtccccttggagcctccccaggcttaatgattgtccagaaggcggctataaagggagcctgggaggctgggtggaggagggagcaaaaaaaacccaactcagcagatctgggaactgtgagagcggcaagcaggaactgtggtcagaggctgtgcgtcttggctggtagggcctgctcttttctaccatggcagcccagggctatggctattatcgcactgtgatcttctcagccatgtttgggggctacagcctgtattacttcaatcgcaagaccttctcctttgtcatgccatcattggtggaagagatccctttggacaaggatgatttgggttcatcaccagcagccagtcggcagcttatgctatcagcaagtt

SEQ ID NO: 34821 - DNA, 415 bp, Homo sapiens
ggagaaaaacacagcgctaaaggcaagattccctgagtgcaaatgataccagcactacagccagtaaatagccttaggccagcagcagcataggagagctgagcctgcaactctaggttaagcccagccccaaaaagttaaagtggctactggtccttttataaagccctagtaaataaaaaactaaaaaattaaaaataaaaactaaagtggctgctggtcagtagcactccttgccttcctaaagaggtaaaccaaattctctttcaagcagtggttttcatactccagtgtgtgtcagaatcctctgtagggcttgttaaatacaggttactgggcctcactttcagcttttctcatttagcgagtctgggatgggggctctagaacttgcatttctttttttttttttttg

SEQ ID NO: 34822 - DNA, 426 bp, Homo sapiens
  misc_feature (1)...(426): n = A,T,C or G
gggcgagccccccctgaaaacatgngacatcgtaacccgatacgccagcttggcacgagggttcttttatatctgattgtttatttagatttctattctatttgtgggtaatctagctagcaatttaccaattttgtctttttgaaaaaccaactctttattctgttgggcatttttattggttttggacttcatgtcatttggttctggtctgatttttatttatttcctcttctaacttgggatttgatttggtattaattttctagttctttgaaatgtgatgtcaggtccttaatatgtaagctttctatttttttgatgcaggcctttaggctattaacttcccttttagtactacatttgatgtatctcacaggttttattatattgtggttctatttccatcttttttcccacaaattg

SEQ ID NO: 34823 - DNA, 424 bp, Homo sapiens
  misc_feature (1)...(424): n = A,T,C or G
ggataacatcacagccaagaaaaaatcattagtatagtccacacaccttcagatttggccggatttacgtgcactgtatgagatgtacatctgtgcatttttatcatatgtgtagctttgtgtgacgccagcatttttaagcaattgaatagtatcagagtgcattacatctgttaagggtaagtgttgatgtggaaacgtattttagttacatatgcacatcatgactggattgtagaaatgtctcttgactgtgagtcacagtggagaattttgaaaaccacaggtcgttcagtcatcagacttgattttatttcactaaaatgggctgctagagagctcaagggactctgatttctaattggctgctcagggtgcccctgaccacttacttctggtacttggaaaacctagattaattggn

SEQ ID NO: 34824 - DNA, 420 bp, Homo sapiens
  misc_feature (1)...(420): n = A,T,C or G
gggtagaattaatggttgaggcaggaccatacagagtgtgggaactgctggggatctagggaattcagtgggaccaatgaaagcatggctgagaaatagcagagccccacttaactccataaactgcttcccattccgcagcccagttctgattgttgaggtgtcgcgtcgttccaggtcccccagtcccctctttctcctgtcctctctctgtccttcacctccccactccagccccggctcagttcagggaaatgctgttccacatcagccctctgctctctgaggcagccgcgcctctgactcggagctacttgaaacttctgctcttgctaggattggagtctacctatctcttccatttgtcccagctggagttctggaactttcctcctcggggtgggggntgggggggnnaan

SEQ ID NO: 34825 - DNA, 421 bp, Homo sapiens
ggcccacgagaacatctacctctgggacattcacaacccccgtgtgaagctcgtctcgtggcccctctgctcactgcgccgctatggccgggatgccacacgctttaccttcgaggctggccggatgtgtgatgctggggaaggactctataccttccagacacaagagggggagcagatttaccagcgcgtccacagtgccaccctggccatcgcagagcaacacaagcgggtcctgctggaaatggagaagaacgtgaggctgctgaacaagggcacggaacattactcgtatccctgcacacccacgaccatgctgccgcgcagtgcctactggcaccacatcactggttcccagaacatcgccgaagcctccagctatgctggtgagtcgcttccatgccccacacccacctgccag

SEQ ID NO: 34826 - DNA, 495 bp, Homo sapiens
  misc_feature (1)...(495): n = A,T,C or G
ccgcccgcgcntcgtttggacttttgaattagaaccctgcttggcacgaggcagagaataacttacagatgtgacgtttgtgatcgttaaaactggaaacagcgcaagagtggacgataggggatgagagagccacacagcgcatagaagatgatcagtctgaagagagggttttcagacatgcaattaactgctattcactgtacttcattttaactgcaaactagcagtctctttccccaggaaaaaagaggtcaactcggaggagccagggattcagcccactctggacaacactcagagccatggcacctacctgtatgaaaaaaaattgttaagcagctgccactcctagttactggcctctgctcggtgactgatgcacttctaacatccttgtcccaggataaagaccttgtaatggagaaaaaagatggcagggatcctttccatggaatttcggctgttgtctagtggaccttccaggaattgtcg

SEQ ID NO: 34827 - DNA, 406 bp, Homo sapiens
ggagtagcttctctgttgttttttcatggagtattcagagaaacttaagtctgggtgcaaaatcggaaatagcaacagataagctttcttttcctcttaaaaatattactcgaaagaatatcgctaaaatgatagcaggcaacagcacagaaagttcaaaaacaccagtgaccatagaaaagatttatccatattatgtgaaagcacctagtgattctaactcaaaacctataaagcaacttttatctgaaaataatttcatggatattaccatcattttgtccagagacaatacaactaaatataacagtgagtggtgggttctcaacctgactggaaacagaatatacaatccgaactctcaggccctggaactggtggtcttcaatgacaaagtcagtccccc

SEQ ID NO: 34828 - DNA, 485 bp, Homo sapiens
  misc_feature (1)...(485): n = A,T,C or G
cttgacaccctntgagattaacgctcggaccangcctacgccaagcttggcacgaggggcaaccagggcctggtggcccaccctgccgcctctgtggagaggcctcccgaggccgggccccatcccgagatgaaggggccctcttattgggctcacgtcggccccgccgggatgctgctgagcgatgtgctgcagccctgatggccagccggcgtaagagtgaagccaagcagatgcccagagctgcacctgccactcgggtaacacgccggagcacacaggagagcctgacagcaggcggaacagaccttaagagggagctgcaccccccagccacctcccatgaggctcctggcaccaagcggtcaccttctgctccagcagccacctcctctgcctcttcttctacatcctcatacaaacgggcaccagctagctcagccccacagcctaagcccctaaagcgtttcaagcgagctgcaggg

SEQ ID NO: 34829 - DNA, 420 bp, Homo sapiens
  misc_feature (1)...(420): n = A,T,C or G
ggtgataacatgggggagaggttttgctcgtgtttcaccaggagaaaatcagcttcctgtttggatacccactagacatttgaagttctacaatgaacccatcagagatgcaaatgaaagtgcctccgcagagacagaaaacccacaatcgagcatcatccacccgcaggatgaacaaaatggtgatatcagaagaacagataaagttaccatccaccaagaaaacagcacatgtggagagcccgggagaagaatagaaagaaaaagagacggagatcagagacagacacagaaagtgagattggggagatagtgttaaagagagagagagagagagagagagagaccattagagaagggagacaaagagataaaaggtgcgagtcancaggtgaggagaaagactgaaaactatgagaa

SEQ ID NO: 34830 - DNA, 399 bp, Homo sapiens
  misc_feature (1)...(399): n = A,T,C or G
aggtgttccatgttttatgttggttaaaaagtctgtacgcttattaaggaaaaaaattagtggcagngctatttatattgaaatgtacatatacatgtatttacttagtctactacagctttttttatgtggcatctaagtgctagatgtaaatataaagatatttggggagaaagacagacacagaggtgtctacttccttaaacaaacagcagccatatctgtggttgtttctaatgcacagaagggctgaggagaccaggttgggatgacagcaaagctttgcttagtacaagtatttctgtgtaatgagaccatgatctcctgagcagtgactgacaaagtggtaagaaaacaccatgagtgatgtggaattaacttcagctcccagaaatatgg

SEQ ID NO: 34831 - DNA, 482 bp, Homo sapiens
  misc_feature (1)...(482): n = A,T,C or G
tgaggcggngnnggttttnnttttggagaccattatgactaggattacactcagcttggcgcgacgacaaaattggctacaaccccgacacagtatcatttgtgccaatttctggttggaatggtgacaacatgctggaaccaagtgctaacatgccttggttcaagggatggaaagtcacccgtaatgatggcaatgccagtggaaccacgctgcttgaggctctggactgcatcctaccaccaactcgtgcaactgacaagcccttgcgcctgcctctccaggatgtctacaaaattgggggtattggtactgttcctgttggccgagtggagactggtgttctcaaacccggtatggtggccacctttgctccagtcaacgatacaacggaagtaaaatctgtcgaaatgcaccatgaagctttgagtgaagctcttcctggggacaatgtgggcttcaatgtcaagaatgtgtctgtc

SEQ ID NO: 34832 - DNA, 417 bp, Homo sapiens
ggagaaaattggctacaaccccgacacagtagcatttgtgccaatttctggttggaatggtgacaacatgctggagccaagtgctaacatgccttggttcaagggatggaaagtcacccgtaaggatggcaatgccagtggaaccacgctgcttgaggctctggactgcatcctaccaccaactcgtccaactgacaagcccttgcgcctgcctctccaggatgtctacaaaattggtggtattggtactgttcctgttggccgagtggagactggtgttctcaaacccggtatggtggtcacctttgctccagtcaacgttacaacggaagtaaaatctgtcgaaatgcaccatgaagctttgagtgaagctcttcctggggacaatgtgggcttcaatgtcaagaatgtgtctgt

SEQ ID NO: 34833 - DNA, 410 bp, Homo sapiens
ggtttgttttgagatgtagtcttgccctgtcacccaggctagagtgcagtggcgccatctcggctcacttcaccttccacctcccagattcagccgattctcctgcctcagctcccgagtagctggaactacaggcatgtgccaccatgccaggctaattttttagtatttttagtagagacagggttttgccatgttggtcaggctggtctcgaactcctgacctcaagtgatcccacctgcctcagcctcccaaagtgctagaattacaggcgtgagccaccatgcctggccgctggtgcattttttaaagagaaaaataatgcatttaactgaggggagccccatgttctgactgtaggttggaggtaggcccagggagagggaggtcctctgaggggctgtccttt

SEQ ID NO: 34834 - DNA, 477 bp, Homo sapiens
  misc_feature (1)...(477): n = A,T,C or G
agggcggggnnggtttgnttttggagaccgttatgactggattacactcagcttggcacgaggagaaaattggctacaaccccgacacagtatcatttgtgccaatttctggttggaatggtgacaacatgctggagccaagtgctaacatgccttggttcaagggatggaaagtcacccgtaaggatggcaatgccagtggaaccacgctgcttgaggctctggactgcatcctaccaccaactcgttcaactgacaagcccttgcgcctgcctctccaggatgtctacaaaattggnggtattggtactgttcctgttggccgagtggagactggtgttctcaaacccggtatggtggacacctttgctccagtcaacgttacaacggaagtaaaatctgtcgaaatgcaccatgaagctttgagtgaagctcttcctggggacaatgtgggcttcaatgtcaagaatgtgtctg

SEQ ID NO: 34835 - DNA, 470 bp, Homo sapiens
  misc_feature (1)...(470): n = A,T,C or G
ggccaaaattganaaccgttatgtccatgatcactccaagcttggcacgaggagaaaattggctacaaccccgacacagtagcatttgtgccaatttctggttggaatggtgacaacatgctggagccaagtgctaacatgccttggttcaagggatggaaagtcacccgtaaggatggcaatgccagtggaaccacgctgcttgaggctctggactgcatcctaccaccaactcgtccaactgacaagcccttgcgcctgcctctccaggatgtctacaaaattgggggtattgggactgttactgttggccgagtggagactggagttcttaaacccggcatggnggtcacctttgctccagtcaacgttacaacggaagtaaaatctgtcgaaatgcaccatgaagctttgagtgaagctcttcctggggacaatgtgggcttcaatgtcaagagagtgtctgtcag

SEQ ID NO: 34836 - DNA, 459 bp, Homo sapiens
  misc_feature (1)...(459): n = A,T,C or G
nactgacttacgcncatctgaaacnaccantacgccaagcttggcacgaggacaattttgacaaccaagttagtaaacaaaatatcttaacagtttgatgacacaagctactgatgagggtttggaatattaattcagaaggtagtttctcttgtgttcaaaatagctgccatggggctgttacttttaaagtcaaaattttcttctgaaggctcattttggtatttgatcttaaccaagtgattattagagaaatgtatcaactccatgccatctcccaaaataattgtctaagaaaacttgaaagtgtaagggtttaacctttaatttatttctcttaaatacatcttttgatattgttgttgtgacatttctttttctggttagtgggctttccagactttgtaccactgcttctgtttattcatttatatgcttttgtgtcccataaattatttg

SEQ ID NO: 34837 - DNA, 339 bp, Homo sapiens
aacaaaaggctgacatgggaccgctggagttggcaatcatagcagtgtgaggttggcaaggggagcaacccccttcaagacaaggcacaaactatttggcaaggagagatgaggggtgggacctcactgtcaatggacatgctcagggaggccagtgggttacatgcaacaggaggatcattcaggcaacttcagctatgaggctgggcatctgtgagggctgaaggctcaagctgttctcaaaggcttgtgattcacctgggagatgctcacgcctgtgagtctttccacactctctggcaggcgagttagaatgtccagtacttccccagtcacttt

SEQ ID NO: 34838 - DNA, 413 bp, Homo sapiens
acaagggtttttaaacagtctgatttaattaggaagttaaataagttgaggtggggtggagtgggatcatcaaaaggctgacatgggaccgctggagttggcaatcatagcagtgtgaggttggcaaggggagcaacccccttcaagacaaggcacaaactatttggcaaggagagatgaggggtgggacctcactgtcaatggacatgctcagggaggccagtgggttacatgcaacaggaggatcattcaggcaacttcagctatgaggctgggcatctgtgagggctgaaggctcaggctgttctcaaaggcttgtgattcacctgggagatgctcacgcctgtgagtctttccacactctctggcaggcgagttagaatgtccagtacttccccagtcactttggctgc

SEQ ID NO: 34839 - DNA, 408 bp, Homo sapiens
acaagggtttttcaacagtctgatttaattaggaagttaaataaattgaggcggggtggagtgggatcatcaaaaggctgacatgggaccgctggagttggcaatcatatcaacgtgaggttggcaaggggagcaacccccttcaagacaaggcacaaactatttggcaaggagagatgaggggcgggacctcactgtcaatggacatgctcagggaggccagtgggttacatgcaacaggaggatcattcaggcaacttcagctatgaggctgggcatctgtgagggctgaaggctcacgctgttctcaaaggcttgtgattcacctgggagatgctcacgcctgtgagtatttccacactctctggcaggcgagttagaatgtgcagtacttccccagtcactttg

SEQ ID NO: 34840 - DNA, 423 bp, Homo sapiens
  misc_feature (1)...(423): n = A,T,C or G
ggcgagtggagtgggggacactgaaggcaccgagagtaaataacattaaaaggccagaaacttggccgggcgcggaggatcacacctgtaatcccagcactttgggaggccgaggcaggtggatcacgaggtcatgagatcgagaccatcctggctaacacggtgaaaccccgtctctactaaaaatacaaaaaattaaccgggcatggtggcacgcacctgtagtcccagctactcgggaggctgaggcaggagaatggcttgaacccatgaggcggagcttgcattgagccgagatcgcgccattgtactccaacctgggcaacagagaaagactctgtctgtggaaggaaaacgctgaacaaaaactgtctccgcctcagcttcaagtgctgggaggtcatattcccctttgagaatggn

SEQ ID NO: 34841 - DNA, 437 bp, Homo sapiens
  misc_feature (1)...(437): n = A,T,C or G
ggctgaagttaaaaaatgaaggtcacaagtggcagttgcctgacccctgtccccagacattccttgcccgataaccatgagggtccatagttcggatcctgaatgggcctttaggaaatgcaggcctttcccacaccagctagaagggtagccaggcagtagaatttcattcaaccctagggttcccacctgacagagggaagttcggaagtcttactgcttcccacgtccccttcccttctaggcatttatggaaagctttttagtggagcaagagaattctacaatccagcttacctcccaccttaccccaagagccatagctgacggtgatgtgtgaatgtttatatataggtacacgtttgtatgtatatagatctaattgcacatatatgggtagatatttatttatatgttgcaccctaaattatagtaan

SEQ ID NO: 34842 - DNA, 455 bp, Homo sapiens
  misc_feature (1)...(455): n = A,T,C or G
ntttgaaaacctgctaagcacatcantacgccaagcttggcacgaggattggagtgttcaaacagcaggaatgatcacaacagtctccttcactttcatagaatttgatgaaatcgtccaagtgcttcctaaactgaagattaagtttcctaattctctgcaccttaaattcaaggaaacaaatcttgtaatgctgcagcaatttaacgcactagcccaactccgtcgtattgaccagttgacaattgatcctcaaggaaatccaggtgtcaattttacactctggaaatactatgtactgtttaggctaagccatttcagtatgcagaaaataaatggaacagaggtgacacagaatgatatgataatggctgaaaggctctttggaatcctagcacatgtagcatcttctgagttaccccagtatcgtctgatttccattctgggtgatgcca

SEQ ID NO: 34843 - DNA, 403 bp, Homo sapiens
  misc_feature (1)...(403): n = A,T,C or G
aggactaacataccatgggcatatatcgggaggctcaatattaccgagatgacagggctcttccaattgatcagggagatcaatgcaatctcaatcaaaatcccagcagggtttcttttagtgtgcatgaaagttggaaaagccagctctaaatgaagaagagcagagattatcaaatacgacttgaagaaaagaacaaggttagagtctttgactcctggatatcaagacttattttaatgttacaataaaaccgttgggtattaggaccaagacagaaaaatagagcaggatagaggtcataagtagatctgtacatttgtgtcttgaggcattaccaagggacaatgcccagctaatggggaaaagatttatattttaataaactggcattgggataggn

SEQ ID NO: 34844 - DNA, 405 bp, Homo sapiens
ggatggagtcttgctctgtcacccaggctggagtgcattggcgcaatctcagctcactggaacctctgcctcctggattcaagcaattctcctgcctcagcctcccgagtagctaggattacaggggcccgccaccacgcccagataatttttgtatttttagtaaagacggggtttcaccatgttgaccaggctggtctcaaacacctgacctcagatgatccaccagcctcggcctccccaagtgctgggattacaggtgtgagccaccatgcccagcccagaatatttttaaaaacaaaattttgggggtggcagggcagggatgacaaaaaggaacaagagaatatacctatattgtacaaatcaaataattcaaattgaaatggatagaacggtttttaa

SEQ ID NO: 34845 - DNA, 399 bp, Homo sapiens
ggctgaaatttgtatcaattggtggctccctgaagattgtgctggacagagtatgccataaattggcacggggggggtgatcttttttagttttgaaaagcattcgactggacctaaaggtataattattttcaagagtattgactgccattcaggcgtctattaatggaattcccagataaattttgcataatattaaaatacggcaaaataaagttagtcagggcctgaatgtgagaaaatacaacatactttccagaagatagggcttcttttcctcaagatggagacctgcttctgttacacattcttgtgttatactcgggcctgttgtctctaaacaattaataagcttgatcttttaagaatgaattgttcctacacggccattatttaaga

SEQ ID NO: 34846 - DNA, 430 bp, Homo sapiens
ggcagcaattcccatttctgacactagttgtgccagagttccccaagaccaccccaggtttgatgattggctaggagaacttggaagaatcagcatagttccacgcatggctgtgacttattttttttttttttttttttttttttttttttaataaaaaagggggttttttttttcccccctgagggggggcatgggcatagatttttttttattaacatcaaatttttgaattataaaagattttttttttgtcttttcgaggatgttttgatgatatcagtggggccccccctcgcctttttttttttttttttttggagaggggggttttcatacttattgctaaggtgtgttcaacctttttagctttaggggcccccctctttgccccgatgttttttttatttttgtttggagaggaattaag

SEQ ID NO: 34847 - DNA, 470 bp, Homo sapiens
  misc_feature (1)...(470): n = A,T,C or G
ctgatgaccgtcgcgattatcanatgctcagtgcaaagtgtaattgggtcatggtcaaaaacgcttgcaacatctaattggcgttcaagatagtcattcaaaagttcttggcccgctgaagtctgttaacagttgaaacattctacagttaaccattagcatgctagttgtcctaatggaaatttttgaagagtttttcaatatataccctacccttgccaggaagagaagtaaaatcctcaggttgtggggtatttgtttctactccagcctggcaggcaaggctaaaacctgagattatcgatctatgagacatcttgatatgtaaagcacttaatattaaaggcataaaagtgaaactgctaaatatgtatagagaggttgacgtgtgatacgtgggacagttcacatagacatcagagaatttattccagaaagggagcctcctgatgtgatgaatacggcaaagc

SEQ ID NO: 34848 - DNA, 462 bp, Homo sapiens
  misc_feature (1)...(462): n = A,T,C or G
nactgatagcgtcgcacancanacgnnaagnnttggacgaggcttggccctcccttctgttatcaaagataaagcgcctcttcactttaagggcttcaaaatgtaaatggctctaaagttagagtgactgtttgctcttctgctttctggaatgcagatgacagtatggaaagaaagaataatgattctatctaataggaaaggatttcttctttcttttttaaagagtgggtggattttctcccttttgttttgcttttattttcatgctactaacatatcttcagaaggaaatggcaactagtagatcagtaaaattacgaaaacgatgcctgcaaaatttgaaggaatgcaattctgatttgccatttatcagggaaaactgaaagcatttttcttataactttttttctttttctttttttttggaggggggaggcagggtcttgctctgtccctcag

SEQ ID NO: 34849 - DNA, 419 bp, Homo sapiens
ggtccaagaggcagtggtggctgtggcccccaactttggtgctccagggtgggccaactgcttgtgggggcacctgggaggtcaaaggtctccaccacatcaacctattttgttttaccctttttctgtgcattggttttttttttcctcctaaaaggaatatcacggttttttgaaacactcagggggggacattttggggaaaatgcaaaatttttatgccatgggaggctttttcctcacttgaccttggccgttttgtcctaaaagtccaaagtcttgccccgacccaccccatcctttttttttggcactccagtcccaggccttgggcctgaactactgaaaaaggtctggcggctggggaggagtgccaccaatagttcataataaaaatctgttagctctcaaagctaatt

SEQ ID NO: 34850 - DNA, 436 bp, Homo sapiens
ggcactgcagccgccgctgctgttggagtgggctttgcgagtctgaacgttgttggggctaggctcgttaactgccgagagcctccgggtttgcggtggaggacgctgaggcccgtggggggcaggcacccgggcgccgggcctcccagccgacatgtctctagtggcggaagccttcgtctcccagattgcagctgcagaaccttggcctgaaaatgctacattatatcagcaattgaaaggggagcaaattttactttctgacaatgcagcttctcttggagtgcaggcctttttgcaaatgtgtaacttgcctatcaaagtagtttgtagggcaaatgcagaatatatgtctccatctggtaaagaccttttattcatgtgggaaatcaagtagtatcagaacttggccaatagtccaatttggaaagccaag

SEQ ID NO: 34851 - DNA, 420 bp, Homo sapiens
gggtttggaaacttagaggtctatatttaggaagcaaagataagattttttgaggtctacatttacagttaagagtattagtgacttgtatgtgggagaattgggtctactctaacacaagtgtgttcttttcattgtagtgtacctgttatataaatataaaatctgtatatcttgctctctctcccacttttaaaaacaagttcagcaaatgcaaatatatagttaccttcagtgtttagactgtgggacctgcatgtcatttgccactaaagagactagaaggaacatgtcgaaggacccaaaagccaacgtgaaatggctcctactgacttaggctgggatattttgagcattgaaaaggaagattctgcaatgaattaaaagaaataaaatatataaaaatgggtttataatgat

SEQ ID NO: 34852 - DNA, 414 bp, Homo sapiens
  misc_feature (1)...(414): n = A,T,C or G
ggcacagtttaattgctctatgcatttattattagctattattaatgcacaatgagggaacaaaaagctcacaaacactgtacacaatttcacaagacgcattgcaggggaaaaagtgactgatatggatcaacagtatgctaaggtcttggtggacgcattcctgggggaggtggacctctaatgcctggtggagggggtctcattcccggaggcggcatgcctattggcgtccctcgagcagggggaagcccaattggtgggcccatgggtggtctcataccaggtggaggagccataatgcctggaggtggggttgctctgccgacgggtgggggcggagtgccccgtcctggtgggtactgcgttggggctccaccaatactggcagtcgcagcaacagcagcagctgtn

SEQ ID NO: 34853 - DNA, 396 bp, Homo sapiens
ggagattaattagatgttccataaatgtaattactattctctgaatgagtgaagaattcccactttaattttcatttttactttttgtaaaatagccctaagcatcttctggtaggattctgaagttactttggaagaaatgacaggtgtttttttttccccccctaagtacttgtaacttagtagtagccctctcagtattggagatgtaaaaattgaacctggatgattgatggggcaaaatacatttaatcaatttatacattttatttctgttttacagcatttatggggttaagtggcatgggatttctgtttctgatagtaaataggtaagtaaaacaaaaggttatgtatgtccgaagagacggttttaccatatttatggtgattttg

SEQ ID NO: 34854 - DNA, 384 bp, Homo sapiens
ggaaaatttaaccaattttattgaaacgaatttcactgtgtaaaagttggtttgattcaaacatgtagagaagttgtagattcaagatatatgatttctctatggaaataaaaatatttgttagtgaattggttgagttttgattcctctaacttctcagaatgattctttagaattctataattcatagcaatttttgacaagtaagattgcaaaatagaaatatctataaagattccacagtttgacattatggcttgctatgcagatgtgaaaataggttaaataatatgaaagatatggcagaatgtaaagtggaaaagatgacctaaaattttgagttgtattaatagttaaaaacatttgtgtcagatgacagggtgg

SEQ ID NO: 34855 - DNA, 414 bp, Homo sapiens
  misc_feature (1)...(414): n = A,T,C or G
ggtcacaccctanatataaagataccccgtggtgctcccccatcaaggtgaagtatggggatgtgtactgcagggcccctcgaggaggatactacaaaacagccctgggaaccaggtgcgacattcgctgccagaagggctacgagctgcatggctcttccctactgatctgccagtcaaacaaacgatggtctgacaaggtcatctgcaaacaaaagcgatgtcctacccttgccatgccagcaaatggagggtttaagtgtgtagatggtgcctactttaactcccggcgtgagtattattggtcaccaggatacacgttgaaaggggagcggaccgtcacatgtatggacaacaaggcctggagcggacggccagcctcctgtgtggatatggaacctcctagaatcacgn

SEQ ID NO: 34856 - DNA, 465 bp, Homo sapiens
  misc_feature (1)...(465): n = A,T,C or G
gggaggggncccgccctgaaaacatgataacntctgcgccacgctggccgaggagcaggccctggtcaactgcaattggacttcattcaatgatgagacctgcctcatgatgataaacatgtttgacaagaccaagtcaggccgcatcgatgtctacggcttctcagccctgtggaaattcatccagcagtggaagaacctcttccagcagtatgaccgggaccgctcgggctccattagctacacagagctgcagcaagctctgtcccaaatgggctacaacctgagcccccagttcacccaacttctggtctcccgctactgcccacgctctgccaatcctgccatgcagcttgaccgcttcatccaggtgtgcacccagctgcaggtgctgacagaggccttccgggagaaagacacagctgtacaaggcaacatccggctcatcttcgaggactttcgcac

SEQ ID NO: 34857 - DNA, 406 bp, Homo sapiens
  misc_feature (1)...(406): n = A,T,C or G
ggtggcacgagggggggagacacctcggatgtgatttcccagctgtaatttccatctgcttctcctggggaaggggcctttcagagaatcggggctattgtattggattttcaatctgaccacatgccagtgaaggaacaggctggagtggggtgtggacacagggcctgcgtcagtcactcccctcctgcagctagtaagaggcctcagaatggccagctgccagtggcaccttgtctgggagttagttgggccctttgggactctgtgaagggaagacactaccaaggtcacagggccttctggaggtcattctaagtcggctctcttgggagggcagcactcagggccctttgggccctcttgaggagaggagagtcctggcagtaaggtaagatgggcttgn

SEQ ID NO: 34858 - DNA, 399 bp, Homo sapiens
ggggaacggtagaaatttgggtgtttttaaaaccttgtttggggttgttcctgtccttgttgagaatcatagagatgtctgtgttcttggagtatttcacactgaggactaatctgctatcttcattccagtccctacccctcagtgcctgctctcatccaaataacctgggaggtgacaatcaggatatctcaggaggtccaagggggaacagacctctttgcctttcccagcgtctcatacccccggtagtgcaactgtgggtggaggctggggtgtctgcacgaaatcaagccagcgtcctcctccacagcctgtcactgccccctccccagcctgtgtccacagtgctgtgatcccgagggaagtcctccagtctaagtcacagtgccctgacag

SEQ ID NO: 34859 - DNA, 406 bp, Homo sapiens
gggggtactgtggagactgtcaaagactcccggagcccaattttcggaagcggtgagttctgaaagaagttcctgcaccggacttttccaagtatgcgaatccccaaccatgagcgcctcgggcgtactgtcctttacccagcaaggatgggagcaggtgctggccaaagtgaaacgggctgtggtttacctggacgccgcctgcgccgagagcctgcactggggctgcggatccacccgtctcctggaggcggtggggggtcctgactgtcacctgcgaaagttcgagcccgacgcaattggtggtggagccaagcagcccaaggcagtgtttgtgctgagctgcctgctgaaaagccggaccgtggagatcctaccggacatcatctgccgcagtcactttcag

SEQ ID NO: 34860 - DNA, 420 bp, Homo sapiens
gggccaaattttcagcacacctgccagcaacttgggggaataagcgaaggtttccctacaagagggaaagaaggcaaaaacggcacagctatctccaaacacatctgagttcatttcaaaagtgaccaagggaatctccgcacaaaagtgcagattgaggaattgtgatgggtcattcccaagaatcccccaaggggcatcccaaatccctgaggagtaacagctgcaaacctggtcagttctcagtgagagccagctcacttatagctttgctgctagaacctgttgtggctgcatttcctggtggccagtgacaactgtgtaaccagaatagctgcatggcgctgaccctttggccggaacttggtctcttggctccctccttggccacccaccacctctcgcacagaccctctgttt

SEQ ID NO: 34861 - DNA, 401 bp, Homo sapiens
ggtttggggtgatcagacccaacagcaggtcatgggggcgacgaagtccagtggagtccaaggaatgagaaagacagtttgagagacaaaatgggaccagggggctatcacaagtgtggaggctgcaacaaacaggtggtgaggatgtgggggttgaaaggaaacggtgtatcaagtgaatgagaaacatatggctactcgagaacatgggaatgctagaagcaaggagcagcaagtctagcaaacatgcaagccctgcctcagcttctctcccaacactcagcttttcttccaacacatttcatgtgcaaggttctcgtgcccactcctcttgtacagtttggcagcctcatggagcttccctggtaggaaaacacatctgccagaaacaggtcattgtt

SEQ ID NO: 34862 - DNA, 428 bp, Homo sapiens
ggtcaaaaacatgattacagggacatctcaggctgactgtgctgccctgattgttgctgctggtgttggtgaatttgaagctggtatctgcaagaatgggcagacccgagagcatgcccttctggcttacacactgggtgtgaaacaactaattggcggtgttaacaaaatggattccactgagccaccctacagccagaacagatatgaggaaattgttaaggaagtcatcacttacattaagaaaattgggtacaaccccgacacagtagcatttgtgccaatttctggttggaatggtgacaacatgctggagccaagcgctaacatgccttggttcaagggatggaaagtcacccgtaaggatggcaatgccagtggaaccacgctgcttgaggctctggactgcatcctaccaccaactcgtg

SEQ ID NO: 34863 - DNA, 428 bp, Homo sapiens
  misc_feature (1)...(428): n = A,T,C or G
gggcttggtcgcccgaacgcagtgcacctgttcccgctgcagcaggggcaggttggccttgataggaaaaggcagcttttccagcgttaggccctacccaggaaggctcaacacctcctagggctttcacaaagcagatgatacaagataaaagcctttctctccttggcagtctgattttcaaatgcttcttctgtgagtcaatgatatctcttatactgcacttgaattactggttcaattgtctcttgccccaaccagatgtaaatatgcttaaggaagagattgtaccttatttacctttgcagcctagtatacagtcaaagctcaataaagggttgttgaacataataattttaaaacatacgcttctgaagactttagtcagtgagagaattactactgcctatgtgggagtcattccaagn

SEQ ID NO: 34864 - DNA, 407 bp, Homo sapiens
ggaagagagcagctcgcttctaactggactgcacgttggtgacagcgtcccaagctggtgacagacccactctgtaactttcagctagattcagccaccagatcccagaaacatgacccttgctgcctacaaagagaagatgaaggagctcccgctggggtccttggtctgctcctgcttcctggccgatcccctgaataagtcgtcctacaaatatgaagcagacacggtggacctgaattggtgcgtcatttccgacatggaagtcatcgagctgaacaaatgcacctcgggccaatcctttgaagtcatcctgaagccaccctcctttgatggggttcccgagttcaacgcctccctgccaaggcggcgagacccatccctggaagagatccagaagaaactaa

SEQ ID NO: 34865 - DNA, 468 bp, Homo sapiens
acggcccccattgacactttaatagatgactatcgccaagcttggcacgagggaaatttgtcttcagaataactatctccctttctgatctgtctcctactctttatatgttctcaggcaagtactcactgaactcattgatcgagtgctgtctgctaaatctccaaaccattcccaaacctttccccgtagtataccatccagcttccctccccttcctccaaaaccctcccttccacctccccacacccattgagtcattcacaggcaggagggagactgatcattcctctgggttatctgcatctcaaaagaaaatgcttacccacaggaactgttaactcaggggttcttaacttggggtccatcaccccagggggtccatagttggacttcagagggtctatgaaacccctaaaactgtcaggatttaatggatttattcttgtatgttttttccagagcatt

SEQ ID NO: 34866 - DNA, 488 bp, Homo sapiens
cggccccttgattgaaaccttgacctgacacgccgctggccgagctctccccttgcagtcagcacctttgaaaccatgatgggcacagagcatcacatgagctgttctctccttaaagaagatccctggaaaggatgcttttcctctcctttgcctgcgcaggaattctaacaggagtgggtgaggatggcagagggacacagtgcctgtctcgcctccatcagggagagcagccatgccagggatgactagctctttgagcctgtcctcagaggatggcgaggcagccgggcagtggaggccttcatggtaacaaatgaaagctcagtatagaggaacagacactgtttacgtccctcccactgctaaccttatatatctctatagacaaatgtgataatgacatgatttcccacctgccctcccagaaaatggtgactcactctcaagtcagctactgtagagaggggtctaatttggtctgcaat

SEQ ID NO: 34867 - DNA, 489 bp, Homo sapiens
  misc_feature (1)...(489): n = A,T,C or G
tgcagaccccgagggccccctactgaagaccccttganaccctagcgcaagcctggcacgagtgcattgtaagagacagcaagacacatgaaattaaacctacacggtggtatttgcggttggggccaaagcattctgacactttggggtggcattttaatcaaagaaatcaccccgccacctcaccgggattctccataacttccctctgcagaactaattatgttgattttgttcaagttcaacatgttagctaaaagaactatggcggggttttttttcccacttcccacaaacctcaacatgtgccaggcaccctaaaatgcttcacatggttaaaaacaagcacaattttgaatgctacagcaaggatgaaaggcccctagccgtgaaaacagtgctttggggagcagttgtcagtctaagtgatgctattccaagacaaagatatgctgagggaaaatgcccacatgacctgttcccatttgg

SEQ ID NO: 34868 - DNA, 485 bp, Homo sapiens
  misc_feature (1)...(485): n = A,T,C or G
cgancgtcccaggcccccccactgagacgnattganaccttcggaccncanacgccatcttggacgaggcctatgattccacccatggcaaattccatggcaccgtcaaggctgagaacgggaagcttgtcatcaatggaaatcccatcaccatcttccaggagcgagatccctccaaaatcaagtggggcgatgctggcgctgagtacgtcgtggagtccactggcgtcttcaccaccatggagaaggctggggctcatttgcaggggggagccaaaagggtcatcatctctgccccctctgctgacgcccccatgttcgtcatgggtgtgaaccatgagaagtatgacaacagcctcaagatcatcagcaatgcctcctgcaccaccaactggttaacacccctggccaaggtcatccatgacaactttggtatcgtggaaggactcatgaccacagtccatgccatcactgccacccagaaa

SEQ ID NO: 34869 - DNA, 418 bp, Homo sapiens
ggatttccgtgaaggagtaggcggaaatcaccattgtgcggctgaaattttcgcgcgtggtgacgtctgcgtagcgacccttcagttcggtcttgtcggagaagccgatggcgtgaacgatgaaatcgagcttgccccacttcttttcgacttcggcaaagaccgcatcgaccgactcgatatcttcaacatcgcaaggcagtacgaaatcggagccgacctgttcggccagcggctttacgcgcttgccgagtgcatcaccttgataggtgaaggctagttcggcgccctgtgctgcgagttgctttgaaattccccaagcgagtgagtgattattcgcgacccccatgatgaggccgcgtttgcctttcatcaaaccttccatattttccctctccctcagccctgatagcgctgg

SEQ ID NO: 34870 - DNA, 378 bp, Homo sapiens
tacaggtgtgtgccaccacacccggctaatttttatatttttagtagagacagggtttcaccatgttggccaggctggtctaaaactcctgacctcaagtgatctgcccacctcagcctcccaaagtgctgagattacaggcatgagccactgcactcaaccttaagacctactgttctaaagctctgacattatgtggttttagattttctggttctaacatttttgataaagcctcaagggtttaggttctaaagttctaagattctgattttaggagctaaggctctatgagtctagatgtttattcttctagagttcagagtccttaaaatgtaagattatagattctaaagattctatagttctagacatgga

SEQ ID NO: 34871 - DNA, 490 bp, Homo sapiens
  misc_feature (1)...(490): n = A,T,C or G
natgaaaccgtctgaccngatgaccccgtctggacgacgcctcgtgccaagcttggcacgaggtgtgcctgtagttccagctactctgaagggtgaggcaggagaatcacttgaacccaggagatggaggttgcagtgggcagagattgcggccactgcactccagcctgggcaacagagcaagactctgtctcaaaaaaaaaattaaaaagtaatatgggattattatagtttggaaaataccgaaaaatggaagagaagtcaggtacagtttcactgtccaaaaataattaacattaacatcttgggatacttccttccagcctttttctgttagcacagagctttatgctagctatttatgattatgaataccgatatatcctaaaagatcttctcatgctgagcccaggtgttggaggatagaaactgatggtagccaggcaaagtgtatagacataaaaactgggatgacagaatcacggggaag

SEQ ID NO: 34872 - DNA, 384 bp, Homo sapiens
  misc_feature (1)...(384): n = A,T,C or G
ggctggaatttagtcaagcttcaggcccctctgctcctgtctgtgtcttgcgtctgtggccttcctattgtgtcttgtgttttggtggatgtgacagggctggggccacagtctactctgtctctgctgctagagaagccacctgtggaggactgggctgtggttgggcctgaggcctgtggaggaggtgagtgtaaccagcagcggccgtctactcctgttctggcctgagaccaccggtgtgggtcacgaggaccctggcccacagtgttgagggtcctctctttcgggggctctcctggggccttcgatgggcttttcttcttgtcagtggagggagcagctccccactcagccctgggacaggccctgggactgtggtgn

SEQ ID NO: 34873 - DNA, 418 bp, Homo sapiens
ggcgggggctggcaagcatgtgccccgggcagtgtttgtatacttggaacccacagtcattgatgaagttcgcactggcacctaccgccagctcttccaccctgagcaacttatcacaggcaaggaagatgctgccaataactatgcccgagggcactacaccattggcaaggagatcattgacctcgtgttggaccgaattcgcaagctggccgaccagtgcacgggtctccagggcttcttggttttccacagctttggtgggggaactggttctgggttcacctccctgctcatggaacgtctctcagttgattatggcaagaagtccaagctggagttctctatttacccggcgccccaggtttccacagctgtagttgagccctacaactccatcctcaccacccacaccacc

SEQ ID NO: 34874 - DNA, 449 bp, Homo sapiens
  misc_feature (1)...(449): n = A,T,C or G
tccgattgacgatcgtcggacnncnnacnccnggttggaggaggctgggatttaatcaagcttcaagcccctctgctcctgtctgtgtcttgcgtctgtggccttcctattgtgtcttgtgttttggtggatgtgacagggctggggccacagtctactctgtctctgctgctagagaagccacctgtggaggactgggctgtggttgggcctgaggcctgtggaggaggtgagtgtatccancagcggccgtctactcctgttctggcctgagaccaccggtgtgggtcacgaggaccctggcccacagtgttgagggtcctctctttcgggggctctcctggggccttcgatgggcttttcttcttgtcagtggagggagcagctccccactcagccctgggacaggccctgggactgtggtggccggtggccctggcccagctctg

SEQ ID NO: 34875 - DNA, 462 bp, Homo sapiens
  misc_feature (1)...(462): n = A,T,C or G
cgagttgccgaggggggtttgaattgatnaccatctgtgacctcgattacgctcagcttggcacgaggctggaatttagtcaagcttcaggcccctctgctcctgtctgtgtcttgcgtctgtggccttcctattgtgtcttgtgttttggtggatgtgacagggctggggccacagtctactctgtctctgctgctagagaagccacctgtggaggactgggctgtggttgggcctgaggcctgtggaggaggtgagtgtaaccagcagcggccgtctactcctgttctggcctgagaccaccggtgtgggtcacgaggaccctggcccacagtgttgagggtcctctctttcgggggctctcctggggccttcgatgggcttttcttcttgtcagtggagggagcagctccccactcagccctgggacaggccctgggactgtggtggccggtggccctg

SEQ ID NO: 34876 - DNA, 385 bp, Homo sapiens
ggggggatcacattccatcctgagatggacaaacatccaaaccatgtcagtgaatatattacatttatcattaaaactttgttattggtggattccagagtacattaagtacctggtattgaaagtaaggcttaaacatgtatatgtgggtgcttattggtaaatgttttcatctttttgtgtgaagaaatgttgctctttggtgagagtacagagccttcagaaaagctgcagcatgtaagggaaggtgagatccagtttccacacgactttgtgagcactcctttccccttcctcccaactttttccgcatttcccctccagtttctatccttttcccaaggaagaacaggacatatgactaggttgacagatcttgaaaggc

SEQ ID NO: 34877 - DNA, 431 bp, Homo sapiens
ggcaggtagagcccaggcccagagagccccagggctgctaccaggaaggccagcgcatccctccagagagagaagaattaatccaaagcgtgctggcgcaggttgcaaagcagttctcaagagcattcaaaatcaatgaactgaaagctgaagttgcaaatcacttggctgtcctagagaaacgcgtggaattggaaggactaaaagtggtggagattgagaaatgcaagagtgacattaagaagatgagggaggagctggcggccagaagcagcaggaccaactgcccctgtaagtacagttttttggataaccacaagaagttgactcctcgacgcgatgttcccacttaccccaagtacctgctctctccagagaccatcgaggccctgcggaagccgacctttgacgtctggctttgggagcccaat

SEQ ID NO: 34878 - DNA, 467 bp, Homo sapiens
  misc_feature (1)...(467): n = A,T,C or G
ggagggtgntttgattcgatacgtttgacctgattacgccagcttggccgagggagacagcattgaaagcaataccaccttttgataaaggctttttgaatcaaggtttgggccttgacgtggctgtggatgcagtcgttctgacccctggtggccgagaggtgaagtgcagtggcggctgcttgctcaaggccggaggaaggtagtgaccgtgctgggggcaatcagggtcttggactggacggatgtccaggggttcaggccactgccagtttcaccccacatggaaaacagcacccagccttgggctttcctggttcaggaaaagcctctctgtctcctctctggctcttaaccatgctcctttaagcccaggagtgagatgtgtgtcctgccattgaaatctatccctgggtgccacctcttggccctgcctcctgcttccaccaggatagcccacctggggc

SEQ ID NO: 34879 - DNA, 422 bp, Homo sapiens
ggcctttaaaaaagtgtaaatggagaaaagttatattttatgaagggtattttgttgtatttagtattggaaaagttggtttccagagcatttcagaatgtcgaagcaccactgtctttttattagtatatacggcctttagcaaaagtttttgtgattgttacgtgatggtatttaaggttaagtttcacagagcattcaggataggcagaaaactaaaacagtgctatgtctcacataacgtgtcctcagggagcagaatcttggatttgtgacttgtagcttcataaggactcaacgaaagagattgcacagggacatcttcagcggtgtgacagcaggacatgttctttacctagattcaaattctatgtactgtgtgaaatgatgaaggctgcagaaagttatcccatattcagtgt

SEQ ID NO: 34880 - DNA, 392 bp, Homo sapiens
tcacgaggaccaaacattcagacttagtaagtctacaataggctgtatttggcaccagtctactcagaaggctataggacaggaaccacacagctcaccagcaggacaattttgaacctcctttcagaagacggtcttctaacagcaatctatgaaatggtatctccccaggggacagctcacggtcctccttaaaggacatacagttacaagagttttccactcaggtatgcccaaagctggggctttctgtcgtgtatctggagatttcccagtccagatgcaacttaccagtcagggtcatatttaccaaaagcaaagctgcatggcaataaatacagttgacacataccatcctatttagttgtcagggtaggaagagctaggtagtt

SEQ ID NO: 34881 - DNA, 492 bp, Homo sapiens
  misc_feature (1)...(492): n = A,T,C or G
tagagccccccnattgaaaccntatgttgagaatcgtcctaactcggcacgcagccagcttggcacgaaagaaagaatgctattgcccctctgacaatcactttggtacgaaaggagggcattgacttttctaaggccttcatgagtttgggcatatctatcatgatcaaaaagcctcataaatccaaaccaggaggggtttccttattggatcctctggcctatgagatttggatgtgcatagtctttgcctacattggtggcagcgagggcttattcctagttagtagatttagtccatatgaggggcacacagaacagccagaggacggaaaggaaggacccaacgaccagccttccaatgagtttggcatctttaacagcctctggttttccctgggtgcttttatgcagcaaggatgtgacatttcacccagatccctctcaggtcaaattgttggaggtgtttggtggctctttacactcatcatn

SEQ ID NO: 34882 - DNA, 489 bp, Homo sapiens
  misc_feature (1)...(489): n = A,T,C or G
tgaagggccccctttgaaaccgctatgatagtagaacctccaagcttggcacgagggccaaaatgggaaaggaaaagactcatatcaacattgtcgtcattggacacgtagattcgggcaagtccaccactactggccatctgatctataaatgcgggggcatcgacaaaagaaccattgaaaaatttgagaaggaggctgctgagatgggaaagggctccttcaagtatgcctgggtcttggataaactgaaagctgagcgtgaacgtggtatcaccattgatatctccttgtggaaatttgagaccagcaagtactatgtgactatcattgatgccccaggacacagagactttatcaaaaacatgattacagggacatctcaggctgactgtgctgtcctgattgttgctgctggcgttggtgaatttgaagctggtatctccaagaatgggcagacccgagagcatgcccttctggcttacacan

SEQ ID NO: 34883 - DNA, 429 bp, Homo sapiens
ggattaattgttggcttcaaatgtggacacacacacacacacatcatgccaaggagggaatggggtgtttcaagtcaggcagcgatgattctggaaggttggaaatgtaaggttaaaagcttggctggtcttagtaaacttgttcccttgctcccaccaagaagaggtaccaaatgtgagacctgagatctcctccaatatctgtcctctgcagttccgggaaactaatcatgaagtacacatgcagcagctcctccacttgctttcctccgaggtcctcctttccattctcccacctagatactgacacaccgccacggtttccacattggaagggcagaacactgtgcagtatcgtgcacacttgctgggttaggaatagagctgccctagggtcaccttcatgcaagtattgacagctaccaactt

SEQ ID NO: 34884 - DNA, 422 bp, Homo sapiens
ggacacattcctctggtttacaggagacaatggcccgtgggctcaaaagtgtgagctagcgggcagtgtgggtcccttcactggattttggcaaactcgtcaagggggaagtccagccaagcagacgacctgggaaggagggcaccgggtcccaacactggcttactggcctggcagagttccagttaatgtcaccagcactgccttgttaagcgtgctggacatttttccaactgtggtagccctggcccaggccagcttacctcaaggacggcgctttgatggtgtggacgtctccgaggtgctctttggccggtcacagcctgggcacagggtgctgttccaccccaacagcggggcagctggagagtttggagccctgcagactgtccgcctggagcgttacaaggccttctacatta

SEQ ID NO: 34885 - DNA, 420 bp, Homo sapiens
ggaccggctgcgactcatctccctcaagagtgggactgaggagcgaggcctgaagcattactggttcacatcctggcccgaccagaagaccccagaccgggcccccccactcctgcacctggtgcgggaggtggaggaggcagcccagcaggaggggccccactgtgcccccatcatcgtccactgcagtgcagggattgggaggaccggctgcttcattgccaccagcatctgctgccagcaactgcggcaggagggtgtagtggacatcctgaagaccacgtgccagctccgtcaggacaggggcggcatgatccagacatgcgagcagtaccagtttgtgcaccacgtcatgagcctctacgaaaagcagctgtcccaccagtccccagaatgactgcgcttctcctacaggttctc

SEQ ID NO: 34886 - DNA, 498 bp, Homo sapiens
  misc_feature (1)...(498): n = A,T,C or G
ccccccccgccngnnnnnnattgagatcgatttcacctgattacgccagcttggcacgaggcgattgctgacgtgcactcggggcattaaacactttatgccagacgctgctctgcaagccttagggccgtcagctcatctaccctcacagccggcctgtgtggtgggaactgtgaccccgtttcacagacaaggaggcagagcacagagaactcccgaggcagcgactccagagcctccctcagcccctctcccacgggcctcttggatgggggcccagggtgttgcatttcagatttttactgaatgttactcctaacaacctcttgcaccaaattactccagccttcacctcacagtccagaaaattgggcacacaaaccccgagagacgtggcttgcagtgaagccaggacttgcatttactgcagctctggtggcttctccaccatctgttcttcctctttgcagaagcatttcttatggtgttggcggaact

SEQ ID NO: 34887 - DNA, 497 bp, Homo sapiens
  misc_feature (1)...(497): n = A,T,C or G
gagagtcncncccntttgaaaccactatgatagtaaaacgtctccgagggagatcactgccgccttggcttaaagcacatcagagcgcgaaaactggaaacggacattcgtgcaaagaagcgggttcttcggaaagccctcgagcatgttccaaactcggttcgcttgtggaaagcagccgttgagctggaagaacctgaagatgctagaatcatgctgagccgagctgtggagtgctgccccaccagcgtggagctctggcttgctctggcaaggctggagacctatgaaaatgcccgcaaggtcttgaacaaggcgcgggagaacattcctacagaccgacatatctggatcacggctgctaagctggaggaagccaatgggaacacgcagatggtggagaagatcatcgaccgagccatcacctcgctgcgggccaacggtgtggagatcaaccgtgagcagtggatccaggatgccgaggaatgtgacagggn

SEQ ID NO: 34888 - DNA, 401 bp, Homo sapiens
aaccttccccgctttcttgctaccgccggggcgaagatggcctcaggagtgcaagtagctgatgaaggatgtcgcattttttatgacatgaaagttcgtaaatgctccacaccaaaagaaatcaagaaaagaaagaaggctgtcattttttgtctcagtgcagacaaaaagtgcatcattgtagaaaaaggcaaagagatcttggttggagatgttggtgtaaccataactgatcctttcaagcattttgtgggaatgcttcctgaaaaagattgtcgctatgctttgtatgatgcaagctttgaaacaaaagaatccagaaaagaagagttgatgttttttttgtgggcaccagaactagcacctctgaaaagtaaaatgatctatgcaagctccaaggg

SEQ ID NO: 34889 - DNA, 456 bp, Homo sapiens
  misc_feature (1)...(456): n = A,T,C or G
nctgaaaccgtttgacctcatacctgatctcccttgaagctcaagaacatgttcagcgactataactgggttgctgaaccaagtgtgctttatcaggcacttaattctactaagaagacaagaaggaggaggaaagggggaaaggttttaaagagaagaagataccagtgggaaattcagcaggctatactctgacacacacagtgctttatgtactaaagtgcattgaagagtaagatgacagaagtatcctcactttttcattattggaccttttcagtattctagggacacttcaatatatgctttgttctttgaaagtgtttattggttaaaattccataccggaaggtccttaatttgggggcctctttatagatgaagctccacatgaaggagtttggaatgtgtttgttaactgagacatttgcaagaaacccccaaagtgagggcctc

SEQ ID NO: 34890 - DNA, 482 bp, Homo sapiens
tggagcccccctttgaaaccttagattgacaacgtcggacaagccacgccagcttggccaagagtggccataaaataaaattaatatctcattttatcacgggggattaacagcggcaaacttcaatggtgacaggataaaaatcacatagagatattggttcaatatggacatctaaactataatgctaaaagccaataattagaataagttcattttaagaaaagcattaataatattagctaacgtttagtacctgtgccaaacattctacctatgttaccttgattttcataaccagcctaagaggtactattatgtatccccattttacaggttaagaaacaggctcagaggagtttaggatcttttccaagattacatagccagtaagtggtggcactaggaaccaaattcagactctgaatcgcatgctgtttatattatattgcactcattctaaatatgtgggaatcagaatg

SEQ ID NO: 34891 - DNA, 425 bp, Homo sapiens
ggggttgttgatgtcaatgaatcacaaaccaacgcgcggaatgctcctacacttcctatttatgagccaggactaaaagaaggggtctaatcctgtcgaggaaaaaatctttttttttctaccaatattgatgacgccatccaagaagctgaccttgaatatatttctgtgaatactccaacaaaaacctatggaatggggaaaggccgggcagcagatcttaagtatattgaagcttgggctaaacgcattgtgcaaaattcaaatgggtacaaaattgtgactgagaaaagcacagttccagtgcgggcagcagaaagtatccgtcgcatatttgatgcaaacacaaaacccaacttgaatttacaggtgctgtccaaccctgagtttctggccgagggaacagccatcaaggacctaaagaa

SEQ ID NO: 34892 - DNA, 424 bp, Homo sapiens
ggaatggcttttgttaaaggatgatagggttaagagttttttaatagatggcctcaaccatttcctaccccttacctacctgcttcagtggatttcatatttttctttttgacatggggcccttttcaaaggaaatcatatgcagaaccatataaactgtgtaaaagcagattgttaagttgcctagaactggtgtgtggtagttcacaagccaccacaaggggaccatgctgtgatattcaagatatggtttatataaggaactaaatacccacctcaccccactagtgtatgaggcaagcgtcctaagtgaatgggtatgtaatggttcaaatacccatcttatgccaagagcgaaagaaaggtgccacttaatgataaactcataattgaactttgcaaggtttgaagcacacagactgtg

SEQ ID NO: 34893 - DNA, 428 bp, Homo sapiens
ggcatttgttcacctgaagagtattgaataataaggggtacatttgggttatactgaatgagtgttgaaaatgattgaaaatcattgaaaataatttatttggggttgaaattttatcaaataaataatctataagggggatacattatgagcaagttatcaagagtgtcttgatacaaagtattggtaaaagaaaagatagttcacactgagtttgttttcaatttaattcatttttgcagatgtcaacaaaatctttcacctttttatagtatttaggaagaagagagcatgtaaggtcaaactttaattaacttttctttgcctatactggactttccctacacaagtaggtacttatattctgatcacaagtccccacacgtcggttgtagatagcaatgtcaagttagtgcatacccagctac

SEQ ID NO: 34894 - DNA, 423 bp, Homo sapiens
ggaaacatgctcatactggaaagaaaccctatgaatgtaaacagtgtgggaaagcctttatatgttaccaatcttttcaaagacacaaaaggactcacactggagagaaaccctatgaatgtaagcaatgtggtaaggctttcagttgtcccacatactttcgaactcatgaaagaactcacactggagaaaaaccctacaaatgtaaagaatgtggtaaagccttcagttttctcagttcttttcgaaggcataaaaggactcatagtggagagaaaccctatgaatgtaaagaatgtggaaaagccttcttttattctgcaagctttcgagcacatgtaataatacacactggggctcgaccttataaatgtaaagaatgtgggaaagccttcaactcttctaatcccgtcgagtgcatga

SEQ ID NO: 34895 - DNA, 366 bp, Homo sapiens
  misc_feature (1)...(366): n = A,T,C or G
ggcacgagaactggttcaggaccacggatagatagtcttctgcacagggcattctttttgcttcaggatgtttacaacatttgctgcccacttttcctaggtttcttgagacctctacaagagttggagttgacacttggggtactttcttggtgtaacgaactaatagcgcattctggaatttgtactctccaagctgctcaaaaagctcacaattttgtttgattaaattctgaggctcttccacaagagggttaaattcatcgaacactttggcatagcattcatgaggatctgcagcggcacagcacttctctagagtgggttcatatgtcttggcaagtctcagcagcagcacgacagagn

SEQ ID NO: 34896 - DNA, 455 bp, Homo sapiens
  misc_feature (1)...(455): n = A,T,C or G
ntttgatacatttgacctgatacttgagctcgtccgaggccccgtgccacgtgaccatgccgaccacaaaggtgtctgcggaaactcgaggacattcaccacgatgattttcctctctttgatgtacttcaagggcagctcaaaactatatctgcagggatgaatctgtaacttaaattgggccaatcagaattgttatctttgttcaggtaaaatgagttgcaagatattgtgggtacttttgtgtgctcatttgtgttttccccccctcctacaacatttttttaaccccaaaattatagcctgaatgttcgcttttaatctggccagggatctgactcctgagttggttgcctctcccctgctcactccagtcacatagagaattggtgtttcccgcaatggggatgcagctgttggacaggtattgggggcaaggttggtagggaggacaa

SEQ ID NO: 34897 - DNA, 476 bp, Homo sapiens
  misc_feature (1)...(476): n = A,T,C or G
acgtgcantttgaaacatttcttagtaaacttcggaacancannacgccatgcttggcacgagggcaaagttagtaaccctttattgaccaccaaattcaatatactttttaatggcttagatgtaaacgaggttcctccagaaatatctggggcatatgagacagccgtgtgagaaaatgccaagccaggacagataattcacatagtcagtgctgcagaccgagatctttcacctgctgggcaacaattctcctttagattatcacctgaggctgctatcaaaccaaattttacagttcgtgacttcagaaacaacacagcggggattgaaacccgaagaaatggatacagccgcaggcagcaagagttgtatttcctccctgttgtaatagaagacagcagctaccctgtccagagcatcacaaacacaatgactattcgagtctgtagatgtgactctgatggcaccatccg

SEQ ID NO: 34898 - DNA, 427 bp, Homo sapiens
  misc_feature (1)...(427): n = A,T,C or G
ggccctggaaatgtgtcaactgcccgtcagcctggattcaattctgagggctaagccacgaccttatccatgagtggcgaagacacccctgaggaaaggattgcttgcacctcacatctgtcttcttctaagattactcggagattttcaaacaacatctgagaacagaagccccctcccctactcaaagaggaacgagggtggcccacctctcaagggccttggattcctgggaccaccctttgctgggaggaagaatccacaccgaatccttctgtcttcatggcctgctgtgctgaaacagaacagcagggtccatctttcacatctttttttctcccccagatgaaagacgactcangaacggtagggctgggcagaggtgtctctccttgagagacaacaaaagcttctaagggagggagct

SEQ ID NO: 34899 - DNA, 401 bp, Homo sapiens
ggctagcactgcccgggctgactactttgctcaaaaacaaagaaaactgaacagacgtacgagcttcagcttccagaaggagaagaaatccgggcagcagtgacactggcctccagcctcaatctgttccgtagctcaaagcctgcctgccagggccaagtgccctagagcccacccggtgtcctgaagtcctcggggggaggccagcccctggctcactggcacagggcaggtgggctctcggggaaggtgtcgggggccccctatgagggagcgctggggacattgccatgggacggaagtctgcttggcagtggctttgataagcgatgcttgggggtcagaccaccccctagaggagccacgtgccgcccagccaccttcaatgcctgccaccctgg

SEQ ID NO: 34900 - DNA, 394 bp, Homo sapiens
gggggcgagcttgcctgccagaagctcctctcccagcctgcgagcatttccaggctcttgtttcccatcagcctctgggtccaaactaaccacaggtctctgggtccttttccggtgtccttaaggttcttggactctgcatgtgctgccaggttgccagatttctaagaaggagtttgaagaggagaaaaggatttttgcatgtttagaaatcaaggttcaggagaatcttgacagtgaatgtgtctcattacattgaataacagctacaggatgttcgagagctgatttggagtcaaaaacgtatgagaccaaaaaaatattttcagaaaatgatatttttgaaataaatttttcccagtgggagatgaaggacaaaagtaaaacccttggc

SEQ ID NO: 34901 - DNA, 442 bp, Homo sapiens
ggctaaaagccacaatgggaaaggaaaagactcatatcttcattgtcgttattggacacctacattcgggcaagtccaccactgctggccatctgatctataaatgcggtggcatttacaaaggaaccattgaaaaatttgataaggaggctgctgagatgggaaagggctccttcaagtatgcctgggtcttggataaactgaaagctgaacgtgaacgtggtatcaccattgatatctccttgtggaaatttgagaccatcaaggactatgtgactatcattgatgccccaggacacacagactttataaaaaacatgattacagggacatctcatgctgactgtgctgtactgactgatgctgctggtgttggtgaatttgaatctggtatctcctacaaagggcagaccctgaaacaagcccttctggcttacacact

SEQ ID NO: 34902 - DNA, 396 bp, Homo sapiens
ggcaaaactcaccatcagtagaaaacatacagacttctcatgcagaacaagcaaaacccttacaggaggatattttaatgcaaaatattgaaactgggcacccatttcgaagaggatcatcagtaacgacatctcattttgaagttggaaacacatgtccatcaaaatttccttctaaaagcatcacctttactttcagaagcaccagccccagaacaagtacaaacttttcacccatgaggccacagcagcccaaccttcagcattttaagtctagcccacctggatttccatttccagggcctcctaattttcccccacaaagcatgtttggatttacaccacatttgccacctccattacttccccctccaggctttggctttgctcaaaatg

SEQ ID NO: 34903 - DNA, 392 bp, Homo sapiens
gggccaagtaaggcttcgtgcatagtgtcttcatgtcgcgtatagttgagcgcgttcttagcagttggcttcatggacaactcattagtgttttgacttttcttacccagcgttaattgaattcttgcttttagacaacttcctttttgtagaggggaaccttgccctttagtacagttcaagtgaatctggataattgttcatctttgctttagcttagataccatgtagaggtctgtggctacaggaagctggttctgtctgcttccacagtctgcttaaaaaactgtctgacttcgtgaatatagagaccaagtttaccacttctgatgaagagaccaattaagattcattcctcattctgtttctttccagtgggagaagagaccccg

SEQ ID NO: 34904 - DNA, 428 bp, Homo sapiens
ggaagtcaccctcaagggcgccaaggactgtgtggaggcagccaataaacgcattcaggagatcattgaggacctggaagctcaggtgacattagaatgtgctataccccagaaattccatcgatctgtcatgggccccaaaggttccagaatccagcagattactcgggatttcagtgttcaaattaaattcccagacagagaggagaacgcagttcacagtacagagccagttgtccaggagaatggggaccaagctggggaggggagagaggctaaagattgtgaccccggctctccaaggaggtgtgacatcatcatcatctctggccggaaagaaaagtgtgaggctgccaaggaagctctggaggcattggttcctgtcaccattgaagtagaggtgccctttgaccttcaccgttacgata

SEQ ID NO: 34905 - DNA, 415 bp, Homo sapiens
ggaagtcaccctcaagggcgccaaggactgtgtggaggcagtcaataaacgcattcaggagatcattgaggacctgggagctcaggtgacattacaatgtgctataccccagaaattccatcgatctgtcatgggccccaaaggttccagaatccatcagattactcgggatttcagtgttcaaattaaattcccagacagagaggagaacgcagttcacagtacagagccagttgtccaggagaatggggaccaagctggggaggggagagaggctaaagattgtgaccccggctctccaaggaggcgtgacatcatcatcatctctggccggaaagaaaagtgtgaggctggcaaagaagctttggaggcaatggtttctgtcaccattgaagtagaggtgccctttgacctt

SEQ ID NO: 34906 - DNA, 429 bp, Homo sapiens
  misc_feature (1)...(429): n = A,T,C or G
ggaagtcaccctcaagggcgccaaggactgtgtggaggcagccaagaaacgcattcaggagatcattgaggacctggaagctcaggtgacattagaatgtgctataccccagaaattccatcgatctgtcatgggccccaaaggttccagaatccagcagattactcgggatttcagtgttcaaattaaattcccagacagagaggagaacgcagttcacagtacagagccagttgtccaggagaatggggacgaagctggggaggggagagaggctaaagattgtgaccccggctctccaaggaggtgtgacatcatcatcatctctggccggaaagaaaagtgtgaggctgccaaggaagctctggaggcattggttcctgtcaccattgaagtagaggtgccctttgaccttcaccgttacgttan

SEQ ID NO: 34907 - DNA, 442 bp, Homo sapiens
  misc_feature (1)...(442): n = A,T,C or G
ggcgtgccactgagnacgtcgactgagcacatcgccagcacggacgaggaaataaccccctgggagaataattaaccgctcattcatctacctccccaccccatccaacatctccgcatgaggaaacttcgggtcactccttggcgcctgcctgatcctccaaatcaccacaggactattcctagccatgcactactcaccagacgcctcaaccgccttttcatcaatcgcccacatcactcgagacgtaaattatggctgaatcatccgctaccttcacgccaatggcgcctcaatattctttatctgcctcttcctacacatcgggcgaggcctatattacggatcatttctctactcagaaacctgaaacatcggcattatcctcctgcttgcaactatagcaacagccttcataggctatgtcctcccgtgaggccan

SEQ ID NO: 34908 - DNA, 433 bp, Homo sapiens
ggaagtcaccctcaagggcgccaaggactgtgtggaggcagccaagaaacgcattcaggagatcattgaggacctggaagctcaggtgacattagaatgtgctataccccagaaattccatcgatctgtcatgggccccaaaggttccagaatccagcagattactcgggatttcagtgttcaaattaaattcccagacagagaggagaacgcagttcacagtacagagccagttgtccaggagaatggggacgaagctggggaggggagagaggctaaagattgtgaccccggctctccaaggaggtgtgacatcatcatcatctctggccggaaagaaaagtgtgaggctgccaaggaagctctggaggcattggttcctgtcaccattgaagtagaggtgccctttgaccttcaccgttacgttattggg

SEQ ID NO: 34909 - DNA, 426 bp, Homo sapiens
gggtgaggaagagagcagctcgcttctaactggactgcacgttggtgacagcgtcccaagctggtgacagacccactctgtaactttcagctagattcagccaccagatcccagaaacatgacccttgctgcctacaaagagaagatgaaggagctcccgctggtgtccttgttctgctcctgcttcctggccgatcccctgaataagtcgtcctacaaatatgaaggctggtgtgggagacagtgtaggaggaaggatgaaagccagcggaaagacagtgctgactggagagaaagaagagctcaggcagacacggtggacctgaattggtgcgtcatttccgacatggaagtcatcgagctgaacaaatgcacctcgggccaatcctttgaagtcatcctgaagccaccctcctttgatggggt

SEQ ID NO: 34910 - DNA, 423 bp, Homo sapiens
  misc_feature (1)...(423): n = A,T,C or G
ggcaagttaatggtagactaacactggggggtggggtctaggcatcatgcttttgtcagcatactcttgagcttttaagtctactatgtctgaactgtggtttcttgtttatccttttttccttaattggactgtaatgtatggtctgtcaacctgtgaatctttaaagtatgattcagggattgttgtattctttactgtgtaataaaaaagttgaaaaaaatctggatcctctgtctccctcgtccccggngtgccatggttgcccaccagtgaccccagcctgaggagtccatcctccatggtgctgaatcaaatctgtagagtttattcagctacaaagcgtggctctgtaacaggagttggcttatccatgcgtgttgagtaaggaatgatgtcagaactttgcaaaagtcgagctca

SEQ ID NO: 34911 - DNA, 409 bp, Homo sapiens
atcagagaaagaccttcggtacgttggcaaaattttggatggattttccttggcttctaaacctttatcttctaagaaaatctatccacctccagagctgccaagagactatcgaccagtgcattatttcagacccatggtggccgccacctccgagaactcacacttactgcaggtattatcagagtcagctggaaaggcaacgcctgacccagggacacacagtaagcaccaactgaatgcctccaaacgggctgagttgcttggagagacgcctattcaaggttcagctacttcagtgttagaatttctgtcccaaaaagacaaagagagaatcaaagaaatgaagcaggcaactgacctgaaagcagctcagctcaaggccaggagtctggcccagaacgctcag

SEQ ID NO: 34912 - DNA, 416 bp, Homo sapiens
  misc_feature (1)...(416): n = A,T,C or G
agaaattttggaatccataagagccaaaaagggagacattgataatgttaaaagcccagaagaaacagaaaaagacaagaatgagactgagaatgactctaaagatgctgagaaaaacagagaagaatttgaagaccagccccttgaaaaagacagtgacgacaaaacaccagatgatgaccctgagcaaggaaaatctgaggagccaacagaagttggggataaaggtaactctgtgtcagcaaatcttggcgacaacacaacaaatgcaacttcagaagagactagtccctctgaagggaggagccctgtggggtgtctctcacaaacccccgatagcagcaacatggcagagaagaaggtggcatctgagctcccccaggatgtgccagaagaacctaacaagacatgtgagn

SEQ ID NO: 34913 - DNA, 420 bp, Homo sapiens
ggattggtttttcatatatgtttggtatttaaatgactgtggttataaataaaattgtatgtgagacacttttaaaacctttaccatgttttagcagatttctttctttcttttttttaaatggagtctcactctgttgcccaggttggtgtgcagtgagccgagatcgcgccactgcactccagcctgggcaacagagcgagactccgtctcaaaaaaaaaaaaggtttaaaaagggggtactaccaccgggaaaagaggtgttcttctttcccgggctcttatagggaagaccttaccgtattcccggtaggggttctaacgggagccggtttttgccaataaagggcggcttttcacttggtgggggaacctgggagaccaaaaggggcccccttcagtgttggccgccccctgatg

SEQ ID NO: 34914 - DNA, 416 bp, Homo sapiens
ggacacagtccgtgtatccagaattctaattgatctagggagtgggagagcctgcctctctattttttttaaattggtgtgaaatatacataacataaaattggccattttaaccattttaagtatataattgagtgacattaagtagatttattatattatggaaatggacttaacacgatttatttccagaacttttttatcatcccaaacagaaactctgtactcattaaacagtaactccctgtttccccactcccccttgccccagacgctagtaacctccattctacttcccctttctgtgagtctccctgttgtaggtacctgatgtaagtgaaatcagaccatgtttgatcttttgcggctggcttattcacttagcatacgattttcaagggttatacatgcgtgca

SEQ ID NO: 34915 - DNA, 426 bp, Homo sapiens
ggcaaaaaaaatggtatgtgaagatgcaccgtcttttcaaatggcctgggagagtcaaatggcctgggagagggggcctgcccttctctgctgtgtcctttcggcttcccagttgagctcccaagaccaggacccactggggcatataaaatctctgctgtatcctttcggcttcccagttgagctcccaagaccaggacccactggggcatataaaaaagtcaaaaatcaaaatcaaacaacaagttctgagttacttaggaaacagacttcgcatttcaatcagagaggccacagagcaaggtctaaacttctggcttctagacaaattcctgatagaacatttaaatgtgggaagtggcttccccaggtcccatcccctgtttagggatagagttgatatcatttttataggtgccatgtatg

SEQ ID NO: 34916 - DNA, 409 bp, Homo sapiens
ggaatgtggcaaggtcttcagtcaatgttcacgtcttacagtgcatctgagaattcatagtggagagaaaccttacaaatgcaatgaatgcggcaaggtctacagtcagtattcacatcttgtagggcatcgaagagttcatactggagagaaaccatacaaatgtcatgaatgtggcaaagcctttaatcagggctccacactcaatagacatcagagaattcataccggagagaaaccttacaaatgcaatcagtgtgggaattcctttagtcagcgtgtccatcttagacttcatcagactgttcatactggagacagaccttacaaatgtaatgagtgtggcaaaacctttaaacggagctcaaacctcactgcacatcagataattcatgcaggaaagaaacct

SEQ ID NO: 34917 - DNA, 440 bp, Homo sapiens
ccccatgaaaacatcgagtgatcaccactccagcttggcacgaggctccccgggttgtggataagggctggattttggttatatgactaagggcgacagaggctgctggcatctctggccaccgtcccagtggcttaaggttggaggcttcactggcaaaacaatggcactgtttaactagctcgtgttaaccattcatctacagcaagtagaatcatcagttttgcactgagcaaggaagcacatgggtctcctatgagagctaatgccagaattcacatgctttgtaaaatataggatgaggtttctttctttcttctgccccctccagaggccaaatgggtagggtgggtcctttgccttctgagtgcctggatgcccccagccctcacaagaccctgctaagacactggcagtgtgccaagccttgggtgggatgg

SEQ ID NO: 34918 - DNA, 386 bp, Homo sapiens
ggaccaaacattcagacttagtaaggttacaataggctggatttggcaccagtctactcagaaggctataggacgggaaccacacagctcaccagcgggacaattttgaacctcctttcaaaagacggtcttctaacagcaatctatgaaatggtatctccccaggggacagctcacggtcctccttaaaggacatacagttacaagagctttccactcaggtatgcccaaagctggggctttctgtcgagtatctggagatttcccagtccagatgcaacttaccaggcagggtcatatttaccaaaagcaaagctgcatggcaataaatacaggtgacacataccatcctatttacttgtcaggggaggaaaagctaagtagtt

SEQ ID NO: 34919 - DNA, 444 bp, Homo sapiens
  misc_feature (1)...(444): n = A,T,C or G
ntatgccaattcggttttatgatcttcgcaaccacgannacgccaagcttggcacgaggctccccggcttgaggataaggcctggattttggatatatgactaaaggcgacagaggctggtggcatttctgggcaccgtcccagaggcttaaggttggaggcttcactggcaaaacaatggcactgtttaactagctcgtgttaaccattcatctacagcaagtagaatcatcagttttggactgagcaaggaagcacatgggtctcctatgagagctaatgccagaattcacatgctttgtaaaatataggatgaggtttctttctttcttctgccccctccagaggccaaatgggtatggaggttcctttgccttctgagtgcctggatgcccccaaccctcacaagaccctgctaatacactggcagtgtgccaagccttg

SEQ ID NO: 34920 - DNA, 411 bp, Homo sapiens
ggctggaaagcgccgtacaaatgtgagagatcagttttattatcatatcactgttttccactgcctcttgaatcggctttattctaaccaaccattacatctttctcatcttttggagtatgggtaattgaggcttgggtgtgtcatcagggactggagttatttcagctcccatgtaaaggtgggagaggtggttgatggggcagtggaagttagataccagcgatgtatatggtaggacattttcctgggtcactttgacagtaccttgggaaattgtcaatccttgcagagggcctaggctgggcacaagggagaaagcgaacagttgactaagaattgaggggagggtctggagcgctactgccctcctgtcattgctgtgggtgggagaggctaagacttcaggtg

SEQ ID NO: 34921 - DNA, 444 bp, Homo sapiens
  misc_feature (1)...(444): n = A,T,C or G
ttttcatagaaaacatcttgatgatcaccactccagctncgcacgaggacacagtcagtatgtagcagggccagcattcaaatcctcatctgtctatcaaacccatattcccttctattatgctatactgttttcaagttgaaggaaatcaaaccaagaatttctgttttttcactgcgattataaggaaaaatattatttttctgaaatgagacatattgatgtttaagaccttgaggtgacaggtaaaatttggaatatctgtgatgggaaaatgcacaaaggaaggaatgggtaaaagatacctattaccatctatgccctggtatttcacttcttccattgcacagcatagactttagattggccatggattaaaaatttgagaattctgacaaaaaactaaatagaaaggagtttgttttttaagtaggtatatgatgg

SEQ ID NO: 34922 - DNA, 463 bp, Homo sapiens
ggctgaaaaccgtcttgaccatgattaccttgatctccgtccgagggtcaggaagagagcagctcgcttctaactggactgcacgttggtgacagcgtcccaagctggtgactgacccactctgtaactttcagctagattcaggcaccagatcccagaaacatgacccttgctgcctacaaagagaagatgaaggagctcccgctgggggccttgttctgctcctgcttcctggccgatcccctgaataagtcgtcctacaaatatgaaggctggtgtgggagacagtgtaggaggaaggatgaaagccagcggaaagacagtgctgactggagagaaagaagagctcaggcagacacggtggacctgaattggtgcgtcatttccgacatggaagtcatcgagctgaacaaatgcacctcgggccaatcctttgaagtcatcctgaagccaccctcctttg

SEQ ID NO: 34923 - DNA, 445 bp, Homo sapiens
  misc_feature (1)...(445): n = A,T,C or G
nctgaccaantcgatangtngnatcttcgaaaccacgannacgccaagcttggcacgaggattttttcccattgtaaaattagcactgtttaacaaagaacctaagtggcatcctatgagggggtaaacctgaaggctagtttatgaggaattgtccaagttggagtttaaataatatctgcttttggctcaaagcatctaagttattctgacagaaaatggtgagtcagctttgcaggcagatgcgcctctgggcctcctaccttgctccacagctttctggccatcttgtctcccaggccatgccactgctctgccacatgtcaacaaatttctttccaccaggcttatagcatcttacatgatcaaatcatcacagaataaccccgtgatagattattgatagccatagagaggggcgggtttgtcactgatttttctctcn

SEQ ID NO: 34924 - DNA, 418 bp, Homo sapiens
ggggcgaggcctgcggagcggaggaagacaaacatattgatgaagtgcttaattcaaggtcacacaatgtcggggatggacctccagatttccttactggtgagacgtggtcttgtaacacagtggttaagaatgtgactttggagccagcctgctaggggctgaattctgactcagccatttactaactgtgtgaccttagggaggaggacctggttgatagaagaatttatctcgtagtcttaacatccactgtaattccaaactttgaggacgatagagatcagtgggctttgactgcccagcatgcagtctccattcttaggtgggttcccaagcctgtaaaatgtaagccttatgctgctgagggccatcttgccaccctgagggaaacgctgcctgagaatgaaacaagcat

SEQ ID NO: 34925 - DNA, 422 bp, Homo sapiens
  misc_feature (1)...(422): n = A,T,C or G
ggcctcgtgccacatgaacatcaagctgggccctgccctcaagatctgcgccaagataaatgtcctcaaggagacctaagggggccctcttgcacaaaccagcctaaggcagacactctccactgtccaggttataacctggtaccagcagactttgcagggaagaaagagttgttccaatcatgtaaccttctgtaggggattactgagacagggaagagaagtgcaagaattggttgctggtgctacatggcggcagctttgacattttctctggggtctactttattttttaaaaactttacaggtctcaccatttcacgtaccttaatccaatctttataaaagaggcagtctaaagaactaggactgctcagccttatcctggagtggagcatttagcccaggtcttaattctccan

SEQ ID NO: 34926 - DNA, 466 bp, Homo sapiens
attgggattgatgcttcgacctgatacgccagcttggccgaggggaggctgcgtctgtatccgggcccaaggtcaccgcgcgaccggctgatgcgtgctgcaggccccggccacatgagcagcgctacggacgcgactgccccggccttggatatgccaaatcgagtgtccacccgtccgtgggactggtcgcctgactctgcctgccccaccctctggttcaccccactggtggccaaatagccgatgtctaatcccccacacaagctcatccccggcctctggcgattgttgggaattctctccctaattcacgcctgaggctcatggagagttgctagacctgggactgccctgggaggcgcacacaaccaggccgggtggcagccaggacctctcccatgtccctgcttttcttggccatgggtgcaaagccgaagccctgggtacagactgagggccctga

SEQ ID NO: 34927 - DNA, 417 bp, Homo sapiens
gattccttcaacaccttcttcagtgagacgggggctggcaagcatgtgccccgggcagtgtttgtagacttggaacccacagtcattgatgaagttcgcactggcacctaccgccagctcttccaccctgagcaacttatcacaggcaaggaagatgctgccaataactatgcccgagggcactacaccattggcaaggagatcattgacctcgtgttggaccgaattcgcaagctggccgaccagtgcacgggtctccagggcttcttggttttccacagctttggtgggggaactggttctgggttcacctccctgctcatggaacgtctctcagttgattatggcaagaagtccaagctggagttctctatttacccggcgccccaggtttccacagctgtagttgagccctac

SEQ ID NO: 34928 - DNA, 422 bp, Homo sapiens
  misc_feature (1)...(422): n = A,T,C or G
ggggtctgcgagccaggattcccgatccagagacaatggccccgatgggatggagcccgaaggcgtcatcgaaagtaactggaatgagattgttgacagctttgatgacatgaacctctcggagtcccttctccgtggcatctacgcctatggttttgagaagccctctgccatccagcagcgagccattctaccttgtatcaagggttatgatgtgattgctcaagcccaatctgggactgggaaaacggccacatttgccatatcaattctgcagcagattggattagatctaaaagccaccctggccttggtcctatcacccactcgagaattggctcaacagatacagaaggtggtcatggcactaagagactacatgggcgcctcctgtcacgcctgtatagggggcaccaacgtgn

SEQ ID NO: 34929 - DNA, 425 bp, Homo sapiens
ggcacgtcctgggggtatcaagatctgtgaggcctttccaagccctcaccattccctctttggtcccacgttgggtgggcagctgggaaggtcctagttgattttaatctccggtgctttccccagaactgctgctctgaataaaccaaagctgtgaaagagtgttctgcgcaggctgcgggcccagcctctgggtgcaggccctgggcacttgagctgagcagctcagctggctctgctgtgagggaaagccgtgaacttaactgtgctgagagctgggtgagggcaaaatggggaagactgaagaagaaggagcaggtgggagagaccagccgctaacatggtgtctacttctccgtggatcagagaagggatgagtagcaaatgcagaggcagggtggtctcccagcaacaaggatgtccag

SEQ ID NO: 34930 - DNA, 419 bp, Homo sapiens
ggaaaatccaactgactctgaaaaaaaatcttctcttttttcaaaattcaccaacttgcgatgattctcctgcttttcatggttaagttcttatctaatttcaatttggtggcaccctggcgctataggcaagtattcatgttgaagttagtattaagaccaaaattataatgcttttcttaatgggggaaccctaaggctactcactcagtccattgaggggataagagagatggctcattcccatccagttttgtttacaaacgatgttgctcaaatttacgtgactggctactagggaaataaatgaatgtggaattgaggatggaacaaagaattcaatgctttacaataaatggactgtatttgagagttcaagacaggattggagaaaataactgagtatgtctaaaatggag

SEQ ID NO: 34931 - DNA, 418 bp, Homo sapiens
cgagggcagtgaagactagaaaattagactgtgattcagaaaatgttctgtttgctgtggaactacattactgtacagggttatctgcaagtgaggtgtgtcacaatgagattgaatttcactgtctttaattctgtatctgtagacggctcagtatagataccctacgctgtccagaaaggtttggggcagaaaggactcctcctttttccatgccctaaacagacctgacaggtgaggtctgttccttttatataagtggacaaattttgagttgccacaggaggggaagtagggaggggggaaatacagttctgctctggttgtttctgttccaaatgattccatccacctttcccaatcggccttacttctcactaatttgtaggaaaaagcaagttcgtctgttgtgcgaatg

SEQ ID NO: 34932 - DNA, 422 bp, Homo sapiens
ggggtgaggagttgtgcagggtttggggaaaggaaggctggcttggcgagagggcaggtttgcgggctttcgcccccttttccaaagaccaacaaagagtccttccccaactcccaactcaaccccttttggaactatgtggggaggttgggaccctgtggcgcatccttgtcgctcgagtccttctcatgcccggcgacgcgtctttgtggtaacgccctgctgccatctcttttcttctctatgcgaggatttggactggccgtgagaataacagacaacgattcacgtctactttctaggaagacttccatgtgctccatctcgcgcggacctgagcatggtgaatttccaaatcctaaataagccgcgcggagagagttgcattatgctgcgcttatctttctgctttcctcgccctg

SEQ ID NO: 34933 - DNA, 416 bp, Homo sapiens
gggtcatgcaatatttttagtataagtatgtcccaaatattgtataaccacacacattattcattgtttatctgaaattcaaatttcactgggcatcctatgaaaagtctgtcaattttatctgtccgcatttaggaaggtgcagtatgtttcaaagtagctggagtgatgcagggaggaaaggcagagtgggccggatggggctgagaggcacacaggaggcagtttgtaaaaaacctatgctatgttaagggatttagattttatcctgaaattagtgatgagcccttggagagctttaaccacagggatgtgaaaccacagagacagcagtgtcgggcacgaagaaatgagtgtcactttctatggctgaatagcaaattactccaaatttaaagtcttaaacagtaaacatt

SEQ ID NO: 34934 - DNA, 418 bp, Homo sapiens
gggctacaacagaacttcagacagcaaagtcctgacatgtgcagccgtgtggaggatgccgaaggaattggaatcaggcagccacgagtcccctgatgattcatccagcactgcacagaccctggagctgctctgtcaccttgacaacacagcccatggcaacatggcctgtgtcgtgtgggagccaatgggagatgggaagaaaatcatttccttggctgataaccatatcctgctgtgggatttacaggaaagctcgagccaggctgtgctggccagctcagcgtccctggaagggaagggacaactgaagttcacctcaggacggtggagcccacatcataactgcacccaggtggccacagcgaacgacaccaccctccgtggctgggacacccggagcatgagccagatctac

SEQ ID NO: 34935 - DNA, 479 bp, Homo sapiens
  misc_feature (1)...(479): n = A,T,C or G
ggcggtannttgggattgaaaacatcgatgancattattacgccacgcttggcacgagggcccttccccccaactgtggccccccaggaggtccccaagatcttcaccccattcatgctgatggggccttcaacaccagctctgtcctgggtcgatggaggaaagcccagccccatggccttgcccttcctggggcatcccacatcgtgccgccgacactgtgtgcccctgggggagtgaaggggccaggggcctttgacccccagcttaagctggctatgccctgagcctgccaacccagtttcagacactcatccttcatccttcctgctgccgccctgggttcctctataaacctcgctgctcagctggccccacaagtcccacatgccccgcatgcgtgcaatgccttcagcccccaagtgagtggtgggtgggtggcaagctgggcctagcacttgctgatagccactatgggg

SEQ ID NO: 34936 - DNA, 435 bp, Homo sapiens
  misc_feature (1)...(435): n = A,T,C or G
natgatgactgtcgggacctcatagacgcccatcttggcacgagggcccggctgcggatctgggaagcgcctcttcacggcactgggatccgcatctgcctgggatcatcaagccctagaagctgggtttctttaaattagggctgccgatttctgtttctccctgggctgcggaaagccagaagattttatctagcttatacaaggctgctggtgttccctctttttttccacgagggtgtttttggctgcaattgcatgaaatcccaatggtgtagaccagtggcgatggatctaggagtttaccaactgagacatttttcaatttctttcttgtcatccttgctggggactgaaaacgcttctgtgagacttgataatagctcctctggtgcaagcgtggtagctattgacaacaaaatcgagcaagctatg

SEQ ID NO: 34937 - DNA, 416 bp, Homo sapiens
ggaatcaatgatggggctgccatcctgaggcaagagaagactatgatagaagtagatgctccaatcacagtatgtggtgatattcatggacaattctttgacctaatgaagttatttgaagttggaggatcacctagtaacacacgctacctctttctgggtgactatgtggacagaggctatttcagtatagagagatggggtcctgccatgttgcctaggctggagtgcagtggctatacacaggtgcgatcatttcgtacctcagcctccaactcctggattcaagccatcctcctgcctcagcttcctgagtatatggaactatagatgcacaccactgtgcctggctagtcattgtatttaataaaacaacttttaaaacatttatttatttatttatttatttatttttg

SEQ ID NO: 34938 - DNA, 477 bp, Homo sapiens
  misc_feature (1)...(477): n = A,T,C or G
agagcctccnatagaaactttgatgancttctntacgccagcttggcacgagggaagcatcgttaaagtctctcttcaccctgccgtcatgtctaagttagagtctcctaaagagcccgaacagctgaggaagctcttcattggagggttgagctttgaaacaactgatgagagcctgaggagccattttgagcaatggggaacgctcacggactgtgtggtaatgagagatccaaacaccaagcgctccaggggctttgggtttgtcacatatgccactgtggaggaggtggatgcagctatgaatgcaaggccacacaaggtggatggaagagttgtggaaccaaagagagctgtctccagagaagattctcaaagaccaggtgcccacttaactgtgaaaaagatatttgttggtggcattaaagaagacactgaagaacatcacctaagagattattttgaacagtatggaan

SEQ ID NO: 34939 - DNA, 416 bp, Homo sapiens
ggctggaagaattcccggccgcgaatttttccagggccagcgtacatggagaacacacccatcaataaaataatgtgtcgaccactgaacacagtgctaaacatctcattctcattcttttgggaaaggatccggctctccctcagtaccatccacacagacaaaaagggtcattaaaatgccatgaccgaagtctccaaacatcacaggaaatagaaaagggaacgtgataatagtatacggagctggatttatctctcggtaaggtccaactccataagcatctactatggtctgaaagccataggtaaactctgttggtttgttatagggggggagaagctggtttgtctgcatcctgttcaaaatggaaggtacagtggaaccactgtgttccgtgccccttctgagtgcaa

SEQ ID NO: 34940 - DNA, 407 bp, Homo sapiens
ggcacattgcgtgatctaatccagaccacagtgaattatgtggtccctgaagcaattggtgtcatcagggacatctttcgcaaataccccaacaagtatgaaagtatcatcgccactctgtgtgagaacttagactcgctggatgagccagatgctcgagcagctatgatttggattgtgggagaatatgctgaaagaattgacaatgcagatgagttactagaaagcttcctggagggttttcacgatgaaagcacccaggtgcagctcactctgcttactgccatagtgaagctgtttctcaagaaaccatcagaaacacaggagctagtccagcaggtcttgagtttggcaacacaggattctgataatcctgaccttcgagaccggggctatatttattggcg

SEQ ID NO: 34941 - DNA, 461 bp, Homo sapiens
  misc_feature (1)...(461): n = A,T,C or G
gaaaagtccccttgaaaccgctnctgatgacatgcgaagcttggcacgagggggtgccagaggcttccatcagctctgcaccttctgcttttctagatttctcagccacagatatgcttttcctgttttacagcctggttacacatttttaggttttattcccatgcatattttatctatgtgattagagaagagggagccttcagcacaggctctttcagtgctgctttgacttgaagttgagattccacatttagcccatcaaataaggaaagatgaagaattttgatgaaggccaaagtctgaggggcctaagaaaaggtgcactcacatgcacggttgttaggagaggaattgagaatatacatgaaaatttgaatttgcatcctatttaacacaataattttataaattagcctacagaatacagtgagtaatatatacatttaagatatatgtta

SEQ ID NO: 34942 - DNA, 406 bp, Homo sapiens
ggagcatctatcccatgtttggggggggaactgacattgggattacttgtgttttttcttaacgtggaccattttccaatgccatcctattctagcaaggaaaatatggggcctttgctccctccaagaagactggcggaaattggcttttatttactgttgctgcggagggaacagatatgcacttttctttttaagaattcccagaaagctttttacttttcaatgtatcccgaagacatcatatctgggacttaggaaaatttgacaatcaatttttgcttttataaactctaatggtgaccctcttcagtgcttaatggtaataagagaacacatcaaactagtggttaaatccttcccctacccagaactggggctaatcatataaacacgttcctcagtt

SEQ ID NO: 34943 - DNA, 449 bp, Homo sapiens
  misc_feature (1)...(449): n = A,T,C or G
ggtacccacagtcattgatgaagttcgcactggcacctaccgccagctctttcaccctgagcaacttatcacaggcaaggaagatgctggcaataactatgcccgagggcactacaccattggcaaggagatcattgacctcgtgttggaccgaattcgcaagctggccgaccagtgcacgggtctccagggcttcttggttttccacagctttggtgggggaactggttctgggttcacctccctgctcatggaacgtctctcagttgattatggcaagaagtccaagctggagttctctatttacccggcgccccaggtttccacagctgtagttgagccctacaactccattcttaccacccacaccaccctggagcactcttattgtgccttcatgggagacaatgaagcccattatgacatctggcganaaaactcgatattgg

SEQ ID NO: 34944 - DNA, 586 bp, Homo sapiens
  misc_feature (1)...(586): n = A,T,C or G
gaagattatagagttgattattatcgagtaggaacattatgtgttatgataagaagggtaactttcacccacacacccnccttgaggggnnattgaatacgattgcactatgacacgcccagctnggcacgaggaaaagatagncttccctgtacgtattggtgaagaacgtgcacaaggctgtatggacttcaacttggagttgagttgaggcaagaggatttgtggatattagtcacccatctgcaagaaaaatgctgaggcctcgggtcaagattttgatctgagacatgctgatgcttcaaggagaaatattttcacaatcctctcttccctcaccagaagagaacagtactctctcctagaaacctctaggtaaacacattttatcctaatatcggtagcatataatgcccccccccaaaatatctgttttccatgcaaaaaaggctcaacaagaagtctgtggaggtgagtggttacttcaaagtggcaggagagtgaaaaaaattgccacagaagagcaagaagctctcttaagaaaagggaatttcttttaggaaccccccccaacacaaaacaaccg

SEQ ID NO: 34945 - DNA, 416 bp, Homo sapiens
ggggaacaaggaatattgggcaaaaagtgagtggttagtacgtgcaagcaagcatcggcctgatcacaattgtttttgttttatttttttgctttgggcaaaggtctatttttgtcacccacactgaaaggaaagggggggggtgccccttcccccccgggggttttttttcgtaaggggaaacaaaaaattggaaaaaaaaaaagcccacggaccaatctataaaaaaaaaaaaaggggggccattggaaccggggttaaaaacagggggaaaccccccaccctttaagtcccctaaaattttatgggccattttggggggctttccgaaaaggggattgtgtatggcccataggaaataaggggagaaagggtggactgtttttcccgtaacaaaggtcttgtattcttacgga

SEQ ID NO: 34946 - DNA, 436 bp, Homo sapiens
  misc_feature (1)...(436): n = A,T,C or G
tgcgcccgcgatgagacttcgnatgagaacatcgaagacccgatacgccagcttggcacgagggaatcaaactggcttcagtacagataccttgccaccttttaaggcctctttccagagaacttcacccgacgcttatattatggcaacaagtactgcaagaaggagctcagttacggggtttttaaaccttcatgaaaacctgaagagttcacttttgttattatgctcttaatgatttacagactgatgccagacaaaccttgggaagatgtatcaatggagcatgtgtgcaaaaaaatgtacgaggaaaaaaagtaaattaaggaaaaaatcctcactcattcccatgttgtcaataacaggtttgtttgtgctttgtccaagctgcggagactcttgtacttgatcccctcccaccaattctaaagtagtn

SEQ ID NO: 34947 - DNA, 429 bp, Homo sapiens
gggcccctgtcagtttacagctttttggcacagtcgggacaatacacttgctcctggtggaaaacaaagcgcttgttggccagattcacggagcattttttgcagtggaagcagtagtcgtgccaggattgtccttcataggccaccacactggagcctttaccaaacccgggcctcgaggagctgctaagcttcgattttttctataaagaaccaccacccacgagggacaagtcctctctccacccggatgcctgccccggaggttggcgctgggaaacagggtgagaggcaagcgtttcccgtggcacactgggggcttcctagctttagagactgggtggctcactcttgacacagtccttttcccagtgatggggttcttgcatccagcacacttcttggccacaaagttcttgtagcaatcca

SEQ ID NO: 34948 - DNA, 493 bp, Homo sapiens
  misc_feature (1)...(493): n = A,T,C or G
cgcgggccnnnnnnngggtnnccctgagactttgggctagccatcatnagaaccancannacgccaagcttggcacgaggaagtcaccctcaagggcgccaaggactgtgtggaggcagccaagaaacgcattcaggagatcattgaggacctggaagctcaggtgacattagaatgtgctataccccagaaattccatcgatctgtcatgggccccaaaggttccagaatccagcagattactcgggatttcagtgttcaaattaaattcccagacagagaggagaacgcagttcacagtacagagccagttgtccaggagaatggggacgaagctggggaggggagagaggctaaagattgtgaccccggctctccaaggaggtgtgacatcatcatcatctctggccggaaagaaaagtgtgaggctgccaaggaagctctggaggcattggttcctgtcaccattgaagtagaggtgccctttgacctt

SEQ ID NO: 34949 - DNA, 372 bp, Homo sapiens
ggcacgagctagagaagtgctggggcgctgcagaacctcatgaatgctatgcccaagtgttcgatgaatttaaacctgttgtggaaaagcctcaaaatttaatcaaaccaaattgtgagctttttgagcagcttggagagtacaaattccagaatgcgctattagttcgttacaccaagaaagtaccccaagtgtcaacttcaactcttgtatagggctcaagaaacctatgaaaagtgggccgccaatgttgtgaacatcctgaagcaaaaagaatgccctgtgcagaagactatctatccgtggtcctgaaccagatatgtgcggtgcatgaaaaaacgccagtaagtgacagaggcaccaaatgctgcg

SEQ ID NO: 34950 - DNA, 392 bp, Homo sapiens
ggcacgaggcttacccgcacttagaaaccattaaaggttgcattcctgagcatatgacctattttaaacaaaaacaacacaacatgcacccacactaaactatttgggcccttcaaatcttggcaagtgagtcccgagggacagaaactaatctatgcagttatctagaaagacctttcatttcccctctccttgctgacaccccagaaccataaggaaatagataaacctaatctgaagaaaactggctggggggaatgaaggggaaaagtaagtatatcgaagaggtcttaaacaacattatctctgaaatcacaaaactcctggaacacagatcaatttccctctctgtcccatctcacaacttgaataccctggaagccaccaatgcc

SEQ ID NO: 34951 - DNA, 392 bp, Homo sapiens
ggcacgaggcttttcggcacttagcaaccattaaagtttgcattcctgggcatatgacctattttaaacaaaaacaacacaacatgcacccacaggaagctatctggccccttcaaatcttggcaagtgaggccagagggacagaaactaatctaggcagtgatctataatgacctttgatttcccctcttcttgctcacaccccaaaaccaaaagcaaataaataaacctaggctgaagaaaactggctggagggaaggaaggggaagtgtaagtatatcgaaaaggtcttaaacaacataatctctgagatcagaaaactcctggaacacagatgaatttccctctctgtcccatctcacagcttgattcccctggaagccaccaatgct

SEQ ID NO: 34952 - DNA, 372 bp, Homo sapiens
  misc_feature (1)...(372): n = A,T,C or G
ggcacgagcctcattggctccggcctcaagaccatgtccatcgtgagttacaaccacctgggcaacaacgatggggagaacctgtcggcgccattgcagttccgctctaaggaggtgtccaagagcaacgtggtggacgacatggtgcagagcaacccagtgctctatacgcccggcgaaaagcctgaccactgcgtggtcatcaagtatgtgccgtacgtgggtgacagcaagcgcgcgctggatgagtatacctcggagctgatgctgggcggaaccaacacactggtgctgcacaacacgtgtgaggactcgctgctggccgcacccatcatgctggacctagcgctgctgaccgagctgtgccagcgn

SEQ ID NO: 34953 - DNA, 463 bp, Homo sapiens
  misc_feature (1)...(463): n = A,T,C or G
nttgaaaacatttgacctgattacttgagcttcctcgaggcctttccccgcgcctgggctggcctctagaccaagacaggagcaagggggacagtgaccccaaacccggctccccaaaggtgaaggaatatgtctccaaaaaggccctaccaaaagaagcccctgctcggaagctgctggacagaggtggagaggggctgctgagctcccaccaccagtggcagtttaacctgctgacccatgtggaatctcttcaggatgaagttacgcacaggatggactccattgagaaggagttggatgtgttggagagctggctggactacactggggaactggagccccctgagccgctggccaggcttccgcagctcaagcattgtatcaagcagctgctgatggacctgggcaaggtgcagcagatcgccctctgctgctcaacatgaaactgggcacccaaaan

SEQ ID NO: 34954 - DNA, 406 bp, Homo sapiens
ggcctcgtgccaggaagctatgagggaccctgtgagtagccagtacagttcctttcttttctggaggatgcccatcccagaactggatctgtcggagctggaaggcctgggtctgtcagatacagccacctacaaggtcaaagacagcagcgttggcaaaatgatcgggcaagcaactgcagcagaccaggagaaaaaccctgaaggtgatggcctccttgagtacagcaccttcaacttctggagagctcccattgccagcatccactccttcgaactggacttgctctaaggccaagacttttctctcccatcaccttgccctcattgtgttccctctcaagccccttcctttccactcctttcccattttaatcttggtctctccctactgtgttggtggggg

SEQ ID NO: 34955 - DNA, 472 bp, Homo sapiens
acccttagataaaccttatgccaagcttggcacgaggtggcacgagggatcttccagttccaaccatcagtgccccgagtcgttttgtgtgggatcaagaggaggagcggaagcggcaggagaggtggcagaaggagcaggaccgcctactgcaggaaaaatatcaacgtgagcaggagaaactgagggaagagtggcaaagggccaaacaggaggcagagagagagaattccaagtacttggatgaggaactgatggtcctaagctcaaacagcatgtctctgaccacacgggagccctctcttgccacctgggaagctacctggagtgaagggtccaagtcttcagacagagaatgaacccgagcaggagaagaggagaggagacagccaccagaggaagtgttcatgaggaccaaggaaagaagccgcaggatcagcttgttattgagagagagaggaaatgggagcac

SEQ ID NO: 34956 - DNA, 421 bp, Homo sapiens
ggcctcgtgccagttaaatccaccagagaagatggctcttgatccttacactgaactccgaaaacagcctcttcgtaagtatgtcaccccatcagactttgatcaactcaagcaatttctcacctttgacaaacaggtccttcgattctatgcaatctgggatgatacagacagcatgtatggtgaatgtcggacctacatcattcattactatcttatggatgatacgggggaaattcgagaggtccacgaacggaatgatgggagagatcctttcccactcctaatgaaccgccagcgtgtgcccaaagttttggtggaaaatgcaaagaacttccctcagtgtgtgctagaaatctctgaccaagaagtgttggaatggtatactgctaaagacttcattgttgggaagtcactcact

SEQ ID NO: 34957 - DNA, 390 bp, Homo sapiens
ggctcgagaaaggacagcgtgtaggcgcgtttcaaaccatttcattttcttgggtgaaaagttgcttttttgctaaaactgaggcaaacgttgatcttgagagcttgcagtttgggggcagtaaagttgagaaaggatcatattctgttattggtttgtgggactgcaggtgaagctgctttgtttccctaaaagatactttttggggacaataatttgggagtaaagcggcaagttctaatacccgatttacaattacattgaactacaaggatcccctcactggagatgaagagaccttggcttcatatgggattgtttctggggacttgatatgtttgattcttcaagatgacattccagcgcctaatataccttcatccacagaag

SEQ ID NO: 34958 - DNA, 517 bp, Homo sapiens
  misc_feature (1)...(517): n = A,T,C or G
gaaagtcnaggcatggccggnggaattgaaaccttgagtgngcangnacaagnacacnnccaagcttggacgagggttgaatggtaattcacagtaatgctgccgttgttcgggacttaaagacacttgacctgtttgggctgttgccacttagaagttcatgaccacaaatgtccacagtgtcttcctctgaggaaactcgaatcctgaaatggaaattctttgtggcagataactggcttatgacaccttgaaaagttcaagtgctcatataacacaccacactgaaccccctttcctacagcaatatgttcactatgttaccaatttgcaacttgtgcttcaatagtggaatctactttcattgttaacactgagctaaagaaaaaaagccgtgtgttttatgaatgaccttatctgtttcctggataataccctttaagaataatgtcctgagtcaggcgtggtggggcgtgcatctaatccccaactatttgggagggttgaggcaggaagg

SEQ ID NO: 34959 - DNA, 415 bp, Homo sapiens
ggaggagctatggagaaagaagcagtctgatgtcatgccctttcttctgagggtccgctgctggcagtaccgccagctctctgctctacacagggcttcccgccccacccggcctgataaagcgcgccgactgggctacaaggccaagcaaggttacgatatatataggattcgtgttcgccgcggtggccgaaaacgcccagttcctaagggtgcaacttacggcaagcctgtccatcatggtgttaaccagctaaagattgctcgaagccttcagtccgctgcagaggagcgagctggacgccactgtggggctctgagagtcctgaattcttactgggttggtgaagaatccacatacaaaatttttgaggatatcctcattgatccattccataaagctatcaaaagaaat

SEQ ID NO: 34960 - DNA, 385 bp, Homo sapiens
ggggaggaacaattgatgagcaatattcagagtgtagtaaatttggaaatggtagactgtgttgcgattggggggagggccatgggaggggtacatcgtcaacatagccgatcctgttacatttaatagtagcctcgtaggttgaatttcttctggtagcttcatggtaaatgcatccgaataagccatactggattgcagggtttgtttctgtaaggtgtttaaggacttgacttcctttctcccatgattgctctggactgaacacagcacccacaaccaaccccatgcatgctgctgcctctgggcagtccgagaatctcccacttcactttatcgctgattgtactcacctttatggaatgccaatacattcaaaagggta

SEQ ID NO: 34961 - DNA, 385 bp, Homo sapiens
ggggagtaacaattgatgagcaatattcagagtgaagtaaatctggaaatggtagactgtgttgggattggggggagggccatgggaggggtacatcgtcaacataaccgatcctgttacatttaagagtagcctcgtaggttgaatttcttctggtagcttcatggtaaatgcatccgaataagccatactggattgcagtgtttgtttctgtagggtgtttaaggacttgacttcctttctcccatgattcctctggactgcacacagcacccacaaccagccccatgcatgctgctgcctctgggcagtcgtagaatctcccacttcagtttctcgttgattgtactcacctttatggaatccaaatacatccaaaagggta

SEQ ID NO: 34962 - DNA, 405 bp, Homo sapiens
ggcaacgctgcaccgtttctctaactagatatcgcgtcatgattaaggaagaagtggatagttccgtgaagaagatcaaagctgcctttgctgaattacacaactgcatcattgacaaagaagtttcattaatggcagaaatggataaagttaaagaagaagccatggaaatcctgactgctcgtcagaagaaagcagaagaactaaagagactcactgaccttgccagtcagatggcagagatgcagctggccgaactcagggcagaaattaagcactttgtcagcgagcgtaaatatgacgaggagctcgggaaagctgcccggttttcctgtgacatcgaacagctgaaggcccaaatcatgctctgcggagaaattacacatccaaagaacaactattcct

SEQ ID NO: 34963 - DNA, 400 bp, Homo sapiens
atcctccccttatctcctgtgtcccggaatcggctagcccaggtgaagaggaagatcctggtgctggatctggatgagacacttattcactcccaccatgatggggtcctgaggcccacagtccggcctggtacgcctcctgacttcatcctcaaggtggtaatagacaaacatcctgtccggttttttgtacataagaggccccatgtggatttcttcctggaagtggtgagccagtggtacgagctggtggtgtttacagcaagcatggagatctatggctctgctgtggcagataaactggacaatagcagaagcattcttaagaggagatattacagacagcactgcactttggagttgggcagctacatcaaggacctctctgtggtccacagtg

SEQ ID NO: 34964 - DNA, 472 bp, Homo sapiens
  misc_feature (1)...(472): n = A,T,C or G
cgcccgcccctccaattgagnactgttatagaatgcttacgccaagcttggcacgagggcatctggctattcttggtgcagggctgatgggagcaggcatcgcccaagtctccgtggataaggggctaaagactatacttaaagaggccaccctcactgcgctagaccgaggacagcaacaagtgttcaaaggattgaatgacaaagtgaagaaaaaagctctaacatcatttgaaagggattccatcttcagcaacttgactgggcagcttgattaccaaggttttgaaaaggccgacatggtgattgaagctgtgtttgaggaccttagtcttaagcacagagtgctaaaggaagtagaagcggtgattccagatcactgtatctttgccagtaacacatctgctctcccaatcagtgaaatcgctgctgtcagcaaaagacctgagaaggtgattggcatgcactactt

SEQ ID NO: 34965 - DNA, 496 bp, Homo sapiens
  misc_feature (1)...(496): n = A,T,C or G
agcgtccgcncaaccctttgaaacccttttgataacgtttgacctgatacgccagcttggcacgaggcagatccagagcttgaataaaatgtgttcaaaccttctggagaaaatcagcaaagaggagcgagaatcagagagtggaggtctccggccgaacaagcagacctttaaccctacagacactaatgccttggtggcagctgttgcctttgggaaaggactatctaattggagaccttcaggcagcagtggtcctggccaggcaggccagccaggagctgggacgatccttgcaggaacctcaggattacagcaggtgcagatggcaggagctccaagccagcagcagccaatgctcagtggggtacaaatggctcaggcaggtcaaccagggaaaatgccaagtggaataaaaaccaacatcaagtcggcttccatgcatccctaccagcgagtccttatccacgatggaggctggtgtgaacttgtaccn

SEQ ID NO: 34966 - DNA, 444 bp, Homo sapiens
  misc_feature (1)...(444): n = A,T,C or G
ctagatccgttgcatccctatagaactntanaaccacgantacgccaagcttggcacgagggcagtgtgtatagagaatattatgcagatgcttttaattttttaccctatgtttacatcttgagggggcaaaggctgtctgcagctgtgtggtgagctatgtaaggaaaaaaatctgggctgttatagtgaaaaagtgtgttttatgtcaattgtgaaaggaaaatgttaggagtatggtttttaaacttgggcttcattttaaactttttttttaaacccagttatttcacttgatttgctagcttcagagaagagatccgaatctgtgcccagcgctaaaggctcactgttatcatggcttgtgctggccggtgtgccatattcttgttggagatgaaccgtaacaccagagcccattctttctcgtcagtcttggcccag

SEQ ID NO: 34967 - DNA, 424 bp, Homo sapiens
ggggaagagcttcctcctcgatgcctacaaacaggtgaaattgggtgaggatgcccccaattccagtgtggtgcatgtctccagtgcagaaggaggtgacaacagtggcaatggtacccaggagaagatagctgagggagccacatgccaccttcttgactttgccagccctgagcgcccactagtggtcaactttggctcaaccacttgacctcctttcacgagccagctgccagccttccgcaaactggtgggagagttctcctcagtggctgacttcctgctggtctacattgatgaggctcatccatcaaatggctgggcgataccgggggactcctctttgtcttttgaggtgaagaagcaccagaaccaggaagaacgatgtgcagcagcccagcagcttctgggagcgtctccttgc

SEQ ID NO: 34968 - DNA, 416 bp, Homo sapiens
ggggttttatatcttttctttttatttatttttttcctaagggccaacaattttctagatattatatacaacacaggctttgatcttggggacttttcccatatatttcacactggagtgaatgaagttgtacttcatttctagagaaaagttatacccaggtccccaattgagaatgtcttgcttgattgaaaacgacatcatcccttggtatactccagggattggtttcaggacccctgcatttaccaaaatttgtgcacactcaagtcctgcagtcacccctgcctaaagatagaatggcttctctgtttttcttctgaaatacaaccagaaacaatgtgtctatttctgaaagaataggattaatgatcatacaaatgggttaatcctgaattctggttgaaatctggttt

SEQ ID NO: 34969 - DNA, 416 bp, Homo sapiens
  misc_feature (1)...(416): n = A,T,C or G
ggcggagcttgcagtgagccgagatcacgccactgctctccagcctgggcaatagagggagactccgtctcagaaaaaaaaaaaaaaaaaaaaattcccgggggcccaggggaattacttggccggctttttacaaggggggggctggagaaaaaaggnnnnctnccccttanggttaagcccttccttttaaggggaccctcccctttttcaaaatttaccttgggaaaaggttcaaaacatttataaaatcaagcttttaccctgcttttcctttttgacctggctttaaaaacaaccgaatggtttgtttggttatggtttctttttccaaacatcccggttattttttaaaaaatgggattaaaccaaattttcccctttttttaccctctttttattgaacagatcaaagg

SEQ ID NO: 34970 - DNA, 440 bp, Homo sapiens
  misc_feature (1)...(440): n = A,T,C or G
ttaaatttgatnacattgtaacccctttacgccacgcttggcacgaggggccccttcctatggaggtggaaaagaatagcaccccctctgagcccggctctggccgggggcctccccaagaggaanaanaagaggaggatgaagaggaagaggctaccaaggaagatgctgaggccccaggcatcagagatcatgagagcctgtagccaccaatgtttcaagaggagcccccaccctgttcctgctgctgtctgggtgctactggggaaactggccatggcctgcaaactgggaacccctttcccaccccaacctgctctcctcttctactcacttttcccactccaagcccagcccatggagattgacctggatggggcaggccacctggctctcacctctaggtccccatactcctatgatctgagtcagagccatgt

SEQ ID NO: 34971 - DNA, 447 bp, Homo sapiens
  misc_feature (1)...(447): n = A,T,C or G
ntanacctgatnacctcgtnannctgattacctcttgacctcattacgccagcttggcacgagggcgcgaccttggctcactgcaagctccacctcccgggttcacaccattctcctgcctcagcctcccgagtagttgggactgcgggtgcctgccaccacgccaggctaattttttttgtatttttagtagagaccgggtttcaccatgttagccagaatggtctcgatctcctgacgtcgtgatctgcccaccttggcctcccaaagtgctgggattacaggcgtgagccactgcgcccggcccaaaaaatgtaaatcataagataaagcattggtttcttgtgaacagctacagctacttcatgcggggttcttttgttttagaacctgtgagttccacagatagttgctcctttgagaagctggctggcctggttgatcacn

SEQ ID NO: 34972 - DNA, 442 bp, Homo sapiens
ggtatagtttgtattcaatttgagaccttttctatgggaagctcagtaatttttattaaaagattgccattgctattcatgtaaaacatggaaaaaaaattgtgtagtgaagccaacagtggacttaggatgggattgaatgttcagtatagtgatctcacttaggagaatttgcaggagaaagtgatagtttattgttttttcctcgcccatattcagttttgttctacttcctccccttccttccagatgataacatcacatctctacagtaagtgcctctgccagcccaacccaggagcgcaagttgtctttgccatctggtctatagtacagtgcgcggcgttaggccacaactcaaaagcattatcttttttagggttagtagaaattgttttatgttgatgggaggtttgtttgattgtcaaaatgtacagccacc

SEQ ID NO: 34973 - DNA, 471 bp, Homo sapiens
  misc_feature (1)...(471): n = A,T,C or G
cggtggcactgaaaccgtcggactgacantcgtcgaanngccacgaggaagncaccctcaagggcgccaaggactgtgtggaggcagccaagaaacgcattcatgagatcattgaggacctggaagctcaggtgacgttagaatgtgctataccccagaaattccatcgatctgtcatgggccccaaaggttccagaatccagcagattactcgggatttcagtgttcaaattaaattcccagacagagaggagaacgcagttcacagtacagagccagttgtccaggagaatggggacgaaactggggaggggagagaggctaaagattgtgaccccggctctccaaggaggtgtgacatcatcatcatctctggccggaaagaaaagtgtgaggctgccaaggaagctctggaggcattggttcctgtcaccattgaagtagaggtgccctttgaccttcaccggtacg

SEQ ID NO: 34974 - DNA, 427 bp, Homo sapiens
ggctaaacaggaagacccaaggccagtgacccccataggcctgaggcttgtgcaggcagagggcgtggggtaaggcttcctgatgccccctgtccctgcccagaacctgatggccctcattagtccttggctcttatcttggaagcacaggcgctgacagccgtcccagcccttctgtctgcgggcctgaaccaaacggtgccatggggaactgtctgcacagggtgagtatggggccaggccccagagtcccttatccctatgcccctcatttcccctgctgtttgcccctcaggctttatatctcttccttttcctcctcatcttttctcccttcctgcttttttcctcttacttcaaagtctttttccttctctccttcctatgctagcctcctagctccctcttgtgtccctccctttgcctt

SEQ ID NO: 34975 - DNA, 475 bp, Homo sapiens
  misc_feature (1)...(475): n = A,T,C or G
ntgaacacgcttggacatgctttcgccaagctcggcacgaggcctctttctcagtgtggcttgggaatatatatgagtgaagaatttatctgtgaatcctttgtactgatgattgtttgaaagtctgtgtgtgtccagcacctttgtaaatacacaattcagagcagggatgggctgggtgtgtgtcctggttcttaatgaaaggtcatctcatgtctgtttaatacatggggaatgcaactgtggaacttttgattacctagacttaggtaggtttagaatgagaacatccatctacagtcctcctttgcttgggggattgggctcagaggaacaaaaagttagtctgactctgtgcatattagcatcatgtctttagagaaaggtcagcctctctggttgccaaatactcatcatgatgctcatgacttaaagggtctgaggagcctttgctcccttggatttttgagtcagg

SEQ ID NO: 34976 - DNA, 499 bp, Homo sapiens
cggtgtttttgagaccgatcgagcatctctacgccaagcttggcacgaggcgctggtgtatgatgaggaaatcatggctggctgggcacctgatgattctaaccttaacacaacctgccccttctgcgcctgcccctttgtgcccctgctcagtgtccagacccttgattcccggcccagtgtccccagccccaaatctgctggtgccagtggcagcaaagatgctcctgtccctggtggtcctggccctgtgctcagtgaccgaaggctctgccttgctctggatgagccccagctctgcaacgggcacatggggggagcctcccggcgggttgagagtggggcatgggcatacctgagccccctggtgctgcgtaaggagctggagtcgctggtagagaacgagggcagtgaggtgctggcgttgcctgaactgccctctgcccaccccatcatcttctggaacctttttgggtattttcaacggctacgcctgccc

SEQ ID NO: 34977 - DNA, 442 bp, Homo sapiens
gggttctctttttaaatatacagtcataaactgttcaaggtaaccataacaaactaggtgttatttattaacgtattataaaataatgtttgatccagtatgtgcttgtcttatttaaaattggaatgtgagacatgttgctgtgacctgtttttctttctcattcacatttgtagatattgtgtgaactacagtatataatgataacaattaaaaggatattctgtggatgtcacgtattttgaaatgatagaactacattagctttgtatcatgtttggataattcatcaatgttcacagtttaaaacatcattaaacattatgtaattacaatgagaaagaatcttacttaaatttggagattttcccccacatctcttttccggatacattataattctggacccctatttatctcaaaactcttaatatatgcagac

SEQ ID NO: 34978 - DNA, 407 bp, Homo sapiens
ggcgctctttattgagaaactaccaaaacatcgagatttcaaatcttctgtcattcctgaaaagaaagacacagtaaagaaattaaaggagattgcatttcccaaagcagaagagctgaaggcagagctgttaaaacgatataccaaagaatatacagaatataatgaagaaaagaagaaggaagcagaggaattggcccggaacatggccatccagcaagagctggaaaaggaaaaacagagggtagcacaacagaagcagcagcaattggaacaggaacagttccatgccttcgaggagatgatccggaaccaggagctagaaaaagagcgactgaaaattgtacaggagcttgggaaggtagaccctggcctatgtggcccgctagtgcctgacttggagaagc

SEQ ID NO: 34979 - DNA, 422 bp, Homo sapiens
ggccagtttagtgtctggcatgtagatgctcagtgaatgattgatttgggtagttttggttctttatacgggtcttcaggttagtcccaatgtactggcatggagctagttacttgagcaggtcttcacaaaggtctgagtagcaggtgataaaaggggttgtgaagtctggactcctaacttaagtggtggagatgctaaaagagaaacaaaggcagcagagttgctgagggtagggagtatggcatttattaaccctgtgtttcccccgtcactggtcactgctcttgactcgtagaacaacaggtacagaactgcaagggatcatccccagctccgtgatcaccagatccacaagctctgggggagtcacatcatagactagattcaacaaccgtagggatgcgtggttctgccagtta

SEQ ID NO: 34980 - DNA, 436 bp, Homo sapiens
ggcgaccgcctaagagtcgcgctgtaagaagcaacaacctctcctcttcgtctccgccatcagctcggcagtcgcgaagcagcaaccatgcgtgagtgcatctccatccacgttggccaggctggtgtccagattggcaatgcctgctgggagctctactgcctggaacacggcatccagcccgatggccagatgccaagtgacaagaccattgggggaggagatgattccttcaacaccttcttcagtgagacgggggctggcaagcatgtgccccgggcagtgtttgtagacttggaacccacagtcattgatgaagttcgcactggcacctaccgccagctctttcaccctgagcaacttatcacaagcaaggaagatgctgccaataactatgcccgagggcactacaccattggcaaggagatcattgacc

SEQ ID NO: 34981 - DNA, 435 bp, Homo sapiens
  misc_feature (1)...(435): n = A,T,C or G
ggcaaaaaaagaaaatctatatcagttggggttggttttggttcttcattggctcaaggcagctaactgtctcagtatagcctttggggagatttaacctcattctagccatttttccatcctgaaggccaagaaggactattagaagggtttttgaggggtttcggaggtgagggcccaagacccccataatgacatcattagggattcttgaaaggtgttaacagaccagcacgctcgatgtgttgtacccttcatttatttttttttctcagcatcccaagttggccatcagtacattccccttcaccttacctgatcttcatttaatgcccagnctgtaactaatgttctggttaaagctctcttaatttgttggctatgagtgatttgtgaatctgggatgtaaccctgagtgaggagaaaagggcattt

SEQ ID NO: 34982 - DNA, 437 bp, Homo sapiens
agatgctgccaataactatgcccgagggcactacaccattggcaaggagatcattgacctcacgttggaccgaatttgcaagctggccgaccagtgcacgggtctccagggcttcttggttttccacagctttggcgggggaactggctctgggttcacctcgctggtcatggaacggctctcagttgattatggcaagaaggcccagctggagttctctatttacccggcgccccaggttttcacagctgtagttgagccctacaacttcatactcaccacccacaccaccctggagcactctgattgtgccttcatggtagacaatgaggccatctattacatctgtcgtaaaaacctagatattgagcgtccaacctatactaacctgaataggttaataagtcaaattggagcctccatcactgcttacctgg

SEQ ID NO: 34983 - DNA, 432 bp, Homo sapiens
ggaatattctctgatggtagtttgtatttctgtgggatcagtggggatatcccctttatcacttttttattggggctattggattcttttctcttttcttctttattagtctagctagcaggcaatctattttagtttttcaaaaaccatctcctggattcattgatttttgaagggttttttttggggctctatggttttctattctgctctgagcttgggtatttcttggtttctgctagtttttggatttgtttgctcttgcttctctagctttagatgggagcacatcgctttttgaagccctctctgtttaggtgacagctggcatttctgtatatagtcacatgacaccaactgcaactgcaagggaggtggaaagtggagaggggcacatggatattcatggagcactgtctctaccaccaatgg

SEQ ID NO: 34984 - DNA, 419 bp, Homo sapiens
ggggtgggagctggttatgtgtaactagcgttggagttgacattttggcatgtgctctgagcttgaattttgataccaaccattcagtgcatcatacctagtctttctatgctccaaatgaatgtctgtggggacctgagagcacctggaatttgttggaagcagatcagagcacacgtacgaaaaggtgcaattgcttttctcatgacaaaagaaaaaaaataatcacaaacacatcacactgtggatatcaccttaaccaatgacagaagcctgctgagtttggtctttctcacaggggtaggtagtccacatgaactggcgagcagtggtgaaaacatgacatcaactgctgcgtggttaaaggccaatcatgcattttcctcagtgggtgcaatggtgacaataaactgatttgg

SEQ ID NO: 34985 - DNA, 487 bp, Homo sapiens
  misc_feature (1)...(487): n = A,T,C or G
nattgagnactgaggacagtcccgaccnccattacgccaagcttggcacgaggggtgcactaactaaaggatttaccccactcctgggccttaaaactgaaagagtaggtggttcctgtaagaaccagagaaaacctgtgcaccgagcttcttggtaactgctctgaagacaacagcttgagctagtgtcacctaatacttggtattctggaggacagtatgttatcttggtaaggattactgtaaacaacacttccaacgaaggccttcagattggccacagaaaaggagacaggctcattggccatccagacagcaaacaaactaaagggaaagaaaacgtgggtgaagcctccaatgtatctgcagtggaagacttgagtcctttcagataagaaaaggtatggaaattcttagagattgttgctattggatagatactacctattggccaaatgcacttaattttaatacaggtgaaccattt

SEQ ID NO: 34986 - DNA, 395 bp, Homo sapiens
ggctgcggtgggccttgggtaggagagatgaacccttccggtgccaagctagtcccctctggtgtcctcgactgccctgctccctgtgtatctgcaaacctctgttctcccttctccattcatcaggaagggatctgctgggtaaagtcagactactgcctaccactttttcccaaagtagactgaaagcacatcctgtgctgggcggagcagctgtgtttggatggtttcatttcagcatgagaacagactcaaatagaacggggagacttttccctcaacaaaaggaaagacagtcctatttgcactgtatcacccttgagatactactgttacagagattagaaccacattgagtggggtttctgtggtaatcgaggagaaaagaccagatt

SEQ ID NO: 34987 - DNA, 502 bp, Homo sapiens
  misc_feature (1)...(502): n = A,T,C or G
cttgaccaaccttnnacnnttttgagtaccgtcttgaccatgcttacgccgagcttggcacgaggatgaagaggaacctcccgacaatgcagatagcaagagtgaatatttattgaatcagaaccttaggtccatacccgaacagcttggtggtcagaaagagccttctaagaatgaccatgaaataattaattgttctaactgtgaatctgtggggaccaacgcagatacgccagtattgagaaatattacaaatgaagttttgcagacaaaagcaaaacagcagttgactgaaaagccagctttcttagtaaagaaccttaaaccaagtcctgcagtgaaccttcgaaccgggaaagcagagttcactcaacatcctgagaaagaaaatgaaggggacattacaatttttcctgaaagtttgcaaccttctgaaacgctaaagcagatgaatagcatgaattcagtaggcaccttcttagatgtaaaacgtctcacacag

SEQ ID NO: 34988 - DNA, 418 bp, Homo sapiens
ggatgagaggaaaatatcccttttctaaaaaaataaaaaattaaattttaaaacctcggcgtaaaggggaattctctatagaatgcattgggcacaaaatgaccttcctcagtgtattactgggatggagggagtcgtctctctgtggggtaacaaataagccctgtggccccctcaatccacctcagcctccacagagcatcacttgctgtttcatcccgggttggtccagacagccactgccagtccactagagggagcacttgagaggaaacccatttgctttcattgatctagatctcaaataaaacttcatcttataggctgggcgccgtggctcatcctaaaaacttaaaccaaagggccgacaatgggtttaaaccaaggatcaagcttagatttccatgttatgtaagag

SEQ ID NO: 34989 - DNA, 424 bp, Homo sapiens
ggcgccaatctaatgcctgtttttgaaacattctatgcaactagtctattttctattttattggtcagattttaccacatttctaatcaggctgccaaataaatttttagaaaagaaagttataagcccagaaaaaaaaattatatatttttctagaactctgtacaataatccctaaagaaatcttttatgtgcataaaaaaaatctcaaaacaaattctactgaaattacgttgagactatcaataaccattgccaataattatcaatggacattttaagggatagaatagagaaataccatacattccatggcgtttcaattaattagaacatgacaactgaagcacgcttaattccatccttttaagatgcatgtgtgagaaagatttccatcatcaagggaagcctacttttacatttc

SEQ ID NO: 34990 - DNA, 431 bp, Homo sapiens
ggaaaagcttacagttttccacaaggactttaataactagctgggaaaagacgatgtaattatttcggggctctgcggaaccttctctgtacagcgccccctttctgttgagctattggatgcagctgccatgctcaaaatgcgttttgagagctgaagcaaggtgcttgcagtcacctgaggccgtccgtgtggcccagggccccagctgcctttagggcccccattgttcataacagcatatgcatttccccaccgcgttgtgtctgcagcttctttgccaatatagtaatgcttttagtacagaactatatagtatcagttttggattcttattgttatcacctatgtacgatggaaagggattttaagcacaaacctgctgctcatctaacgttggtacgtaatctcaaatcaaaagctatctgtga

SEQ ID NO: 34991 - DNA, 431 bp, Homo sapiens
ggcctggacattgctgtggattttttcagtttcctgagccaatccatccacctactggaggaggatgacagcctgtactgcatctctgcctggaatgaccaggggtatgaacacacggctgaggacccagcactactgtaccgtgtggagaccatgcctgggctgggctgggtgctcaggaggtccttgtacaaggaggagcttgagcccaagtggcctacaccggaaaagctctgggattgggacatgtggatgcggatgcctgaacaacgccggggccgagagtgcatcatccctgacgtttcccgatcctaccactttggcatcgtcggcctcaacatgaatggctactttcacgaggcctacttcaagaagcacaagttcaacacggttccaggtgtccagctcaggaatgtggacagtctgaagaa

SEQ ID NO: 34992 - DNA, 377 bp, Homo sapiens
ggcctgttttgtggcattcatgcaaaacatgctgagggctttgttcatctggtcatcgtgtccaaatttcagtcatgtttgtagcaagattttggaagcattcatatttcctttttaaaatgtattcctttgtgttcaacagttaatcaaaaccagagagtctagggcagcctctctgatgttgtcaatgatgtaaattcagtccctggtttttaattttctgtctgatgtcacagatcattgttgcacacaaacgtggcatagaaaagaacatgttcagaagccatggggccaagcacatgcggggacggtctcaaatgcgtgatcagagaatccttcacctttgctgaaaagtgagctcagatccagcaccatgt

SEQ ID NO: 34993 - DNA, 418 bp, Homo sapiens
  misc_feature (1)...(418): n = A,T,C or G
ggcacacacatttcagcatttgaagtgacacaagctacctggtaactgcccatggcggggtcatagcttaaatggcccagtgtcctgtacaggttaatttaatcaaaatgagctataaacatggagcaatcactgtataattttaaaatagtttacctggccaggcatggtggctcacgcctgtaatcccagcactttgggaggccgaggcaggtggatcacctgaggtcaggagttcgagaccagcctggccaacatggcaaaacccccatctctactaaaatacaaaaattaggtgtggtggcgggcacctgtaatcctggctactcgggaggctgaggcaggagaatcgcttgaacccgggaggcagaggctgcagagagccgagatcgtgccactgcactccagcctgggccan

SEQ ID NO: 34994 - DNA, 556 bp, Homo sapiens
  misc_feature (1)...(556): n = A,T,C or G
caatgacaagcataacgatgtagtgaatctatatacgtataactactgactgaattaaggagcacaaaagatgaatatcatcggacagcganaaattaatttgaaaaccatttgaanactcttacaccaaccanggcacgaggccaccacactacacaggacaccaaccgctgcagggctcccatgggctgagtggggagcagttttcccctggcctcagtgcccagctccccccgcccacccacgcatacacacatgccctcctggacaaggctaacatcccacttagccgcaccctgcacctgctgcgtccccactcccttggtggtggggacattgctctctgggcttttggtttgggggcgccctctctgctccttcactgttccctctggcttcccatagtggggcctgggagggttcccctggccttaaaaggggcccaagccccatctcaatctggcacgccctaatccactggcctgtgagcaacaagtgtggccaatggaggggggtgctggcccccaagaattccccaaccaaactgtctttgtca

SEQ ID NO: 34995 - DNA, 431 bp, Homo sapiens
  misc_feature (1)...(431): n = A,T,C or G
ctaaataaacttttaaatgcatggaaatttgagtatttttaaatatatagagattataaacaagtttcttaaagacaagttaataggaatatataataactcataatttcaagagccacgactttaaaagtagctgctcttctgaaaaataagcaaacctttatccattgtattttattacaagatactatagaattttaaggtataaaggattataaagtttacctagttcatcctcttttgtatattcaaaatatattcaaataccttgcagaaattcatcatacaactagtttagtttccaattgcttatttctttataagttggttattttgaacttataatgcaatctctgttgtangaataaaacaacaacaacaacaaaaaaaaaacccgagatggttaggttcccaggatgagctaccagtgt

SEQ ID NO: 34996 - DNA, 436 bp, Homo sapiens
ggtgatcattctgatggtctgatgtggctgttgatgtggaactgcagaagagttcagagaagagtatgcaacaaagccataggaaaacacacaggagcttttccctccccttcaggtccccgccctctttccaagctggacaattttttattaagttgtttattccctgccttaaaactgaaacaggaaattttctggtagaaggagggtcatttagtcacgaacactgaagtgggtcaaaattctattctgggtcaaatccttgaattcaaacagatgtccataatcagtactgatggaatagagcaagtttttctatgtaagacaaataaatcaaacatcatgtgcatctcctcataagggtctgcaagggtctgatggtttaaagttcctaacagatctggttgcagcatctgccggagcttgcaccccatca

SEQ ID NO: 34997 - DNA, 428 bp, Homo sapiens
  misc_feature (1)...(428): n = A,T,C or G
ggcgcttaagatacactctcttctcctgttctgatgactctaaatcttttgcctcttccagcaataatgtgtgagtcaacattgcacacctgaaaaaggtttctagaatgggaacccaatgttctttaaaactggagaattccattttccttttctggctttagtgctaatgaccgggaagggaggctcatgatacgaaaataaaaatgagaaaagaagatctagttcataaaatgactataccccacgtaagtttgtaactgcacagtgttttgctgtacggctcacaaatgagcaagagttagtattattaggcacacatcacgttcacatcttcgcgcatagacggatactgtatttggatatatggaagtcatccaaatgcgttgctacaatatcacgcctatgtttgttctggtaaaaccacn

SEQ ID NO: 34998 - DNA, 469 bp, Homo sapiens
  misc_feature (1)...(469): n = A,T,C or G
gggaggagggccncccctgatnntccatgntagctncggacctgctacgccagcttggcacgaggcaggtgtcgtgaaaactacccctaaaagccaaaatgggaaaggaaaagactcatatcaacattgtcgtcattggacacgtagattcgggcaagtccaccactactggccatctgatctataaatgcgggggcatcgacaaaagaaccattgaaaaatttgagaaggaggctgctgagatgggaaagggctccttcaagtatgcctgggtcttggataaactgaaagctgagcgtgaacgtggtatcaccattgatatctccttgtggaaatttgagaccagcaagtactatgtgactatcattgatgccccaggacacagagactttatcaaaaacatgattacagggacatctcaggctgactgtgctgtcctgattgttgctgctggtgttggtgaatttga

SEQ ID NO: 34999 - DNA, 417 bp, Homo sapiens
ggaaataagtgggcccttgtgctgtgaggaagaccaaagcctcagggaagataagagatatggagatgggagggggaggacaaggggcagagagtagggtctagctggctatctctggccttactaacacccccctggaggcatgccccttttctccagcacacaagcacattggggcacctggaaatattggttccaggctcctgttctctggacttcagatcctgggggagcccctcccccccctgaatccctggcttagctaccttcctgcctgtgcacctaaaaacctcaggtcagaactaggaaaagagttttgtttttatttttttgaaatggagtctcgttctgtcgcccaggctgaggtgcagtagtgcaatctccgctcactacaacctccactccctggggctcaag

SEQ ID NO: 35000 - DNA, 425 bp, Homo sapiens
gggttcaaaggcagctccagtaactgctttacagcctgcagcagcgcccagtcctcactgatgagccactcggggttgtcttgaccaggctcagctgtgggtttggcaaaagttggcaggggcttggcgaatggcacctgctgcttcagcagaatattcttcttctgctccttgccctctctgcgaattttcagaagtcctggtgttgcgcggtcaaacagggaccgaggagggacgaccgcctccccgtgacgctgcttcttcttcctgcctgcagctgaggggtctgttttgtgtcgcttccgctccttcctcacgtacacagggggcagcttaacctctgtgatgggagtggcttcatacatgagacacatgaccgagtcgaggtagatgtcgctgtcgtcctgcggcgggttggtggggtc

SEQ ID NO: 35001 - DNA, 410 bp, Homo sapiens
gggcgattgattaataagcagtgagttactgtagcttcctttagttctaccgaactctttttaaaaactcaaacttgagcagccttaaaaaaggggttggggggtgggaaccacaggccatttctctaagtgggctgctgtgaagttttaaatgaaagctctagctttaggagcttgagccatttcctgactgcactggcctggcagtctggctgctgcacaagagtttttaaagaggggtcggagcccgcccgtgagagcgggtcttctcaccatgtggggctgtactacgtggtggtcttggtttctcttcacagaaatgctctctcaccaacttgccccactgtcccaactcctctcctcttagagaaaaaactgtgattacctcaacttgaatatgaaactgtgag

SEQ ID NO: 35002 - DNA, 425 bp, Homo sapiens
ggataactgcatagtaatagggcccttagctctcccgtagtcagcgcagtttagcagttaaaagtgtatttttgtttaatcaaacaataataaagagagatttgtggaaaaatccagttacgggtggaggggaatcggttcatcaattttcacttgcttaaaaaaaatactttttcttaaagcacccgttcaccttcttggttgaagttgtgttaacaatgcagtaaccagcacgttcgaggcggtttccaggaagagtgtgcttgtcatctgccactttcgggagggtggatccactgtgcaggagtggccggggaagctggcagcactcagtgaggccgcccggcacacaaggcacgtttggcatttctctttgagagagtttatcattgggagaagccgcggggacagaactgaacgtcctg

SEQ ID NO: 35003 - DNA, 432 bp, Homo sapiens
atagataaagctgttctggcactcaaagaaagccgggtttccaacattctctcatcccaagacatttggggcacgtgagttaggggcccaagggcaattttccctctgaataacgtgtctgaggcagggatgctacccttaggcttgcttttggccatctttttgcttgggaaaatataacttctttcacaaggaggcaggcttcctatggatgttggagcacctgtttttcctccacacatatcccttttcatggatagaccttgaacaacaaaaagggtgtaccggaataaggatgaactctgctgtgagagccagccactgtaatgaggaatgtgggactgggagtctgtctaaaccccatgggagaagacttcttttgacaggactttaacttaccaagcaacaatcatagctgtgtggaggttttag

SEQ ID NO: 35004 - DNA, 419 bp, Homo sapiens
ggcaggcttctgacctctagaactgggagattatcagtttgtgttgttttaagccactaaatatgtgatcatttgtcataacagcaataggaacctaatacaggggcacatgtaaactgctgagcagaagtttaaataaccagctgggggctatggccatctttcttttgcctccagcataaggtgagcaaagtcctggtggggacacttgctgcttcagccagggtccagagtgagacagacatggaccagagcctgtccagtgaagaaatgaaccttggttgtaagccactgagatttggaggctgcttgttaccacagcataacctagcctctcctgatggacccatttcacctgcactcctcacaaagaactcaagacttccattcattcatcagatactttgcagggtcctttg

SEQ ID NO: 35005 - DNA, 478 bp, Homo sapiens
  misc_feature (1)...(478): n = A,T,C or G
ngcgcggggnnccttgatnaccgttattagcatgactacgccaagcttggcacgaggggagattcttaatgctcttaggccttaccctcaaactgcctcttggaatgactgttccaattgagccctccctaccctctcaccttccaatcagtgctctgtgcatggcttcctggctgtatgggcacttcccaatgaccacagctgacaggtagatgggctcttccagcaagtgcatcaacagtgccccttggcatccgaggacgttccatcgggccatcttgtcactacaggacatggagcgtgttctgtctccacgggctggcttcactcggagcagccccacctggtgaaacgcagcacccggctttccggagtctccagcttctccaggtacacacttggctccagttctataaacgtctatcactttggcactaccaggggctattctggtgacagtagccagtccctctacagg

SEQ ID NO: 35006 - DNA, 413 bp, Homo sapiens
ggcaatcaaggaataggccatttccatcactacagaaagcttcctcatgctccttcccaggccacctcacccaccttcaggctcaggccaccagtgatctgctttcagtccctgctgtttagtttagacttttctagagttttctagagttatgactggatcatacagtatgtctcctttttgtggctggcttttttgtgcatgtcagagttgggggcaggcatcctgatatgtttgagattcaaccatactgtttgctatggtttgaatgtgtccgccagagttcatgtgttggaaacttaacccccagtgcatcaaagctgggtgttggggtctgataagaggtgactaggtcatgacagctctgtcctcatgaatgaattaatgttatttcaagagtgggctttttgtaa

SEQ ID NO: 35007 - DNA, 468 bp, Homo sapiens
  misc_feature (1)...(468): n = A,T,C or G
ntttgattagacatcngaccccganacgccaagcttggcacgaggaacatgagaatttggcatgacaaaatggagaccattttgtatctgctgttgtatcttggccgggttgcagacgtgcactattaaagtcccaagttaatagagcacaaacccttctcgctcctcccccatgtgcccctctttttagatgtgtataacttaaactcgatggctcaggaaaattccactaattagaatcatgtacagtaccccaggtcgttgtccagatatacaagtttgctaatgtagttaagcctggattattaaacacttttcctaaattattgtaaacagaacagcttagagaaaggtattctcagtccttaatattgtatagtagtttatgagcccctctctaaatattggtatttttatattccagagatgtacccaatagaaaaaattaaaaattaatcagtatctaat

SEQ ID NO: 35008 - DNA, 405 bp, Homo sapiens
cagcagctgcttaactgatcctttatacagtgatgggacccattttagtctggacaagggcataaacggctcacaatacattatttgggatgttacctgctgttagctttcattatttttgctacactcattttatttgaatttaaatgttttacgcaacctaagaacaaatgtaaaagtaacgatgccggaaaaatgaattgcttggtattcattacttcatgtatatcaagcacagcagtaaaacaaaaacccatgtatttaacttttttttaggatttttgctttcgtgatttttttttttccgaatttggcctacgttgcatgccgtgttaaaattttaaaaggggaattaattggaaagaagggatcctttgaacaggtctaggaacttccatgaacttc

SEQ ID NO: 35009 - DNA, 386 bp, Homo sapiens
ggcacataaatactagtgtgattatatctttggagtttgcaatatagcataaaggacaagtagaactgcacattaagattacctaccgaagcaactagatgtggctgggacacaatcaaaggaggaattttgtccacaggaaggtgaggaaattccaaatgaagcctagatcttcagtatcataaaaaggcagagctggccaggcacagtggctcatgcctgtaatcttatcactttgggaggctgagatgggaggatctcttgagaccaggtgttcaagaccagcctcatcaacatagtgagaccccatctctattaaaaaaataaataggcagagctaaactaaccccagtgtcacaaaactcaactggtcatataaatgagtg

SEQ ID NO: 35010 - DNA, 474 bp, Homo sapiens
  misc_feature (1)...(474): n = A,T,C or G
gtggnaattttgaaccttttgataccctaggaacatccgcacgccatgcttggcacgaggcctcgtgccaagcttggcacgaggagctgcgctctgagtgcaatttctacaacaacatcatggccctgtacctgaagaccaagggcgacgttcatcctggtgggcgaccttatgcgctcagtgctggtgcttgcctacaagcccatggaaggaaactttgaagagattgctcgagactttaatcccaactggatgagtgctgtggaaatcttggatgatgacaattttctgggggctgaaaatgcctttaacttgcttgcgtgccaaaaggatagcgctgccaccactgacgaggagcgggagcacctccaggaggttggtcttttccacctgggcgagtttgtcaatgacttttgccacggctctctggaatgcagaatctgtgtgagacttccacccccacacatggctcgg

SEQ ID NO: 35011 - DNA, 437 bp, Homo sapiens
  misc_feature (1)...(437): n = A,T,C or G
agagggccccccactgatnacatgangacactattacgcccagcttggcacgaggtgatttagatttggaggggctggggtgggcaaagagcaagaggcgagtaacgagaatggtggtttcaaagatctctcttcccaaatgtgtaaatattctataccacataagtttaaataagaaatttaattgctgcttaatttttgattatgtactttatctgtatagcacgctttgtcgtcagaagtttttatatcgatttaaattgctgctctttagcagccaaacaggagcaaaatgtaaaatttttgaacttactgtggctaatcatcatttgttagtctgtaggtaatgtcaacagttaatttatgaacccacgatcgttgcacactgcgccaaagtcagtcataagagaaatcgaatattctggagcactgattgc

SEQ ID NO: 35012 - DNA, 386 bp, Homo sapiens
ggaccaaggctttgagattgtgttgaatgactacaagtggtttgccttttttaagtataaagaaaagggcagcaaggggaccacttactgcaacgagacaatgactgggtgggtgcatgatgtgttgggccggaactgggcttgtttcaccggaaagaaggtgggaactgcctctgagaatgtgtatgtcaacacagcacaccttaagaattctcaggaaaagtattctaataggctctacaagtatgatcacaactttgtgaaagctatcaatgccattcagaagtcttggactgcaactacatacatggaatatgagactcttaccctgggagatatgattaggagaagtggtggccacagtcgaaaaatcccaaggcccaaac

SEQ ID NO: 35013 - DNA, 452 bp, Homo sapiens
ggatggacatgatggtgtatgtttggaccctgagtgacccggaaaccatagtcaagatccaagatgcacaccggctgcaccatgtcagcagtctggcctggttggaccagcacactctggtcacgacctcccatgatgcctctgtcaaggagtggacaatcacctactgaggagccccacccccgcctctggatggaccgaatcacggactagagtttaactgcagcggaacatggcatttatctatttctgtgacgcgcccccatgcccccaccccaccacaagaggcaggagggcccagtcatgaccctcgtctctgcagggtgtctgtacacagttcttctgaaagctttagacagtaacagtttgcacatgaaaaataaagcgagcacctaaacaatgtgtggagcataactaatacccacagcccaaccagaccttgagaatgcgaa

SEQ ID NO: 35014 - DNA, 434 bp, Homo sapiens
ggaggtatttgactcagctccgcggggactgctgcgtgtggaggagctggttgaccagggccagacgctggccaacgtgttcatcctgcggctgctggagaacgcatatgaccgggaggccacctacatgctaaaggcgtcctctcagagtgagatgaagcgttggatgacctcactggcccccaacaggaggaccaagtttgtttcgttcacatcccggctgctggactgcccccaggtccagtgcgtgcacccatacgtggctcagcagccagacgagctgacgctggagctcgccgacatcctcaacatcctggacaagactgacgacgggtggatctttggcgagcgtctgcacgaccaggagagaggctggttccccagctccatgactgaggagatcttgaatcccaagatccggtcccagaacctca

SEQ ID NO: 35015 - DNA, 426 bp, Homo sapiens
ggcagagaaaagatgccaagtttatcaaagaagagtggtgttaactactagctctggagagtttttgatctggagcaactcagtcagatttgttatcgatgtgggtgtggaaagaagaaaggtgtacaacccgagaataagagcaaactcgctcgtcatgcagcccatcagccagagccaggcagagatacgcaagcagattcttggctcatcttcttcaggaaaatttttctgcctgtacactgaagaatttgcctccaaagacatgacgccactgaagccagcacaaatgcaggaagccaacctaacaagcatggtgctttttatgaaaaggatagacattgcgggcctaggccactgtgacttcatgaacagaccagcaccacaaagtttgatgcaggcattggaagacttagattatctggc

SEQ ID NO: 35016 - DNA, 472 bp, Homo sapiens
  misc_feature (1)...(472): n = A,T,C or G
ggttgcaatgagaccgtcgaatgatcaccctccgagctngcgacgaggaagtcaccctcaagggcgccaaggactgtgtggaggcagccaataaacgcattcaggagatcattgaggacctggaagctcaggtgacattagaatgtgctataccccagaaattccatcgatctgtcatgggccccaaaggttccagaatccagcagattactcgggatttcagtgttcaaattaaattcccagacagagaggagaacgcagttcacagtacagagccagttgtccaggagaatggggacgaagctggggaggggagagaggctaaagattgtgaccccggctctccaaggaggtgtgacatcatcatcatctctggccggaaagaaaagtgtgaggctgccaaggaagctctggaggcattggttcctgtcaccattgaagtagaggtgccctttgaccttcacccgtacgg

SEQ ID NO: 35017 - DNA, 414 bp, Homo sapiens
ggaagtcaccctcaagggcgccaaggactgtgtggaggcagccaagaaacgcattcaggagatcattgaggacctggaagctcaggtgacattagaatgtgctataccccagaaattccatcgatctgtcatgggccccaaaggttccagaatccagcagattactcgggatttcagtgttcaaattaaattcccagacagagaggagaacgcagttcacagtacagagccagttgtccaggagaatggggacgaagctggggaggggagagaggctaaagattgtgaccccggctctccaaggaggtgtgacatcatcatcatctctggccggaaagaaaagtgtgaggctgccaaggaagctctggaggcattggttcctgtcaccattgaagtagaggtgccctttgacct

SEQ ID NO: 35018 - DNA, 460 bp, Homo sapiens
  misc_feature (1)...(460): n = A,T,C or G
nttacatgaaacctngaatgatacgtcganacacatacgccagcttggacgagggaaaactggagagggggaagggccttttgcctggcgaaggtgtatatctttaatctcggggcagttttatttaaggtgaggaaggtcctgggtgtactgaccgcagtgcagtgggaactggttgccagggctcaagccgagttaggagactggcaggaatccaaacgaggtggtcgatgttttaaactgacggtggtgacagtggataccgagaggactggatggattcgagtggggtttaggaaatgaagtctatgaggcttggcgttgggttgactgggaaagtggaggcgtcaaaggtgtcttggacgtgactgtaggttgtggatgggtaccgatcccatcactagagttctgtaagaagactaacctatgagtaacatgtgagaataagttaaaaaaattg

SEQ ID NO: 35019 - DNA, 415 bp, Homo sapiens
ggaaaggataaatataccatgttcatatattgggaggctcaatattacaaagatgacagttctcttccaattgatcaggtagatcaatgcaatctcaatcaaaatcccagcaggttttcttttagtgtgcatgaaagttggaaaagccagttctaaatgaagaagagcaagattatcaaatacaacttgaagaaaagaacaaggttagagtctttgactcctggatatcaagacttattttaatgttacaataagaccgttgggtattaggacaaagacagaaaaatagagcaggatagagttcataagtagatctgtacatttgtgtcttgatgcattagtaagtgacaatgcagtgctaatggggaaaagatttattttttaataaatggtcatttggataggtatacaaggg

SEQ ID NO: 35020 - DNA, 455 bp, Homo sapiens
  misc_feature (1)...(455): n = A,T,C or G
ntttgaaaacgctttagatgactactccagcttggcacgaggggacacatttataagcacacctgtgtgtgtctgagtacatgtgcacacacgtgtgcacaaatgtgcatttatatgagtgtgagtgcatgcatgtgcatgaacatgtgtgcacaagcatgtgtgtatgagtgttcatgtgtatgagtgtgtgtgtatgcaggtgagtgcatgtgtgtgtgagtgtgtttgtgtgttccccttggctgccaggccaacgactgcttctctgcatcctgctgtcttcgctacctgagggtctgtgacttcttccctgtgtgggtccagcctgaccccctgtaagtaaatgtccaaaagccccttgcccctcccctagggctaccagggaacatactctactgcatatgttctagtggaagagaagccggngttctaggaaagaagagccaaacttt

SEQ ID NO: 35021 - DNA, 347 bp, Homo sapiens
acatttttgactgggtgccaacactcgtgaagctggccaggggacacaccaatggtacaaagcctctggatggcttcgacgtgtggaaaaccatcagtgaaggaaacccatcccccagaattgagctgctgcataatattgacccgaacttcgtggactcttcaccgtgtcccaggaacagcatggctccagcaaaggatgactcttctcttccagaatattcagcctttaacacatctgtccatgctgcaattagacatggaaattggaaactcctcacgggctacccaggctgtggttactggttccctccaccgtctcaatacaatgtttctgaaataccctcg

SEQ ID NO: 35022 - DNA, 493 bp, Homo sapiens
  misc_feature (1)...(493): n = A,T,C or G
tggctgtcnnggggnaattgaaaccgtttgacctattgacgcccatcttggcacgagggtagagctcaacgcaggacagattttcaccattctagtgactgccacagcgtccagtgttggagcagcaggcgtgccagctggaggggtcctcaccattgccattatcctggaggccattgggctgcctactcatgacctgcctctgatcctggctgtggactggattgtggaccggaccaccacggtggtgaatgtggaaggggatgccctgggtgcaggcattctccaccacctgaatcagaaggcaacaaagaaaggcgagcaggaacttgctgaggtgaaagtggaagccatccccaactgcaagtctgaggaggagacatcgcccctggtgacacaccagaaccccgctggccccgtggccagtgccccagaactggaatccaaggagtcggttctgtgatggggctgggctttgggcttgcctgccacn

SEQ ID NO: 35023 - DNA, 411 bp, Homo sapiens
gggtagagctcaacgcaggacagattttcaccattctagtgactgccacagcgtccagtgttggagcagcaggcgtgccagctggaggggtcctcaccattgccattatcctggaggccattgggctgcctactcatgacctgcctctgatcctggctgtggactggattgtggaccggaccaccacggtggtgaatgtggaaggggatgccctgggtgcaggcattctccaccacctgaatcagaaggcaacaaagaaaggcgagcaggaacttgctgaggtgaaagtggaagccatccccaactgcaagtctgaggaggagacatcgcccctggtgacacaccagaaccccgctggccccgtggccagtgccccagaactggaatccaaggagtcggttctgtgatggg

SEQ ID NO: 35024 - DNA, 490 bp, Homo sapiens
  misc_feature (1)...(490): n = A,T,C or G
aggcgacnnngnnnaatgataacgtttgacctgtagacgcccatcttggcacgagggtagagctcaacgcaggacagattttcaccattctagcgactgtcacatcgtccagtgttggaccatcatgcgtgccagctggaggggtcctcaccattgccattatcctggaggccattgggctgcctactcatgacctgcctatgatcctgggtgtggactggattgcggaccggaccaccacggtggtgaatgaggaaggggatgccctgggtgcaggcattctacaccacctgaatcagaatgcatcgaagaaaggcgagcacgaacttgctgaggggaaagtggaagccatccccaactgcaagtctgaggaggagacatcgcccctggtgacacaccacaaccccgctggtcccgtggacagtgccccagaactggaatgcaaggagtcggttctgcgatggggctgggctatgggcttgcctgccac

SEQ ID NO: 35025 - DNA, 401 bp, Homo sapiens
gggcgcccgctcggaatgcactggcctatgttttactaagctaggaccggtaattaaggggatggggggcaggggctaggggagggggctgagtttccccactttaggaggaggtgggggctatttctatgcaaatagaaatcagcacattcctcctacttccctttcctccactccccccatatctttaaagtgtggaagcagaaaggacctgcattttcctacattgaggagctgacataggggtaaggtatgggagaggtaggtggatccagggaaaagcagtggggacggaaggcaaagagaccactcaacccccacctggaaggggcaaagaaaagccagagttccatgtttgtactcctgtgctggactgtttcctgagtaccagcaggtccctt

SEQ ID NO: 35026 - DNA, 412 bp, Homo sapiens
ggaaaggataaatataccatgttcatatattgggaggctcaatattacaaagatgacagttctcttccaattgatcaggtagatcaatgcaatctcaatcaaaatcccagcaggttttcttttagtgtgcatgaaagttggaaaagccagttctaaatgaagaagagcaagattatcaaatacaacttgaagaaaagaacaaggttagagtctttgactcctggatatcaagacttattttaatgttacaataagaccgttgggtattaggacaaagacagaaaaatagagcaggatagagttcataagtagatctgtacatttgtgtcttgatgcattagtaagtgacaatgcagtgctaatggggaaaagatttattttttaataaatggtcatttggataggtatacaa

SEQ ID NO: 35027 - DNA, 414 bp, Homo sapiens
gggtagagctcaacgcacgacagattttcaccattctagtgactgccacagcgtccagtgttggagcaacaagcgtgccagctggaggggtcctcaccattgccattatcctggaggccattgggctgcctactcatgacctgcctctgatcctggctgtggactggattgtggaccggaccaccacggtggtgaatgtggaaggggatgccctgggtgcaggcattctccaccacctgaatcagaaggcaacaaagaaaggcgagcaggaacttgctgaggtgaaagtggaagccatccccaactgcaagtctgaggaggagacatcgcccctggtgacacaccagaaccccgctggccccgtggccagtgccccagaactggaatccaaggagtcggttctgtgatggggcg

SEQ ID NO: 35028 - DNA, 413 bp, Homo sapiens
tattcttactacggggatgagtgccacctctcgtaaacggaaagaagaattaactgaagcattgaaaaagcttattttatctaagggcaaaacaccagctctaaaataccagcaactttttgaagatattcggggacaatctgacatagcaattactaaagatatgtttgaagaagcactgcgtgccctggcagatgatgatttcctgacagtgactgggaagaccgtgcgcttgctctgaagccttgtgagcaaggaaggctccctgcatgtcctgcttgctgcacgccacatgggtgtggtctgcatctcagttggccgccatcagtgtaaatagagcttaaagtcatggtttggctgcataaaaattttctaacttgggttcaatatttgtagtgaagtatctgttttca

SEQ ID NO: 35029 - DNA, 419 bp, Homo sapiens
ggggactactggaggactcacgaatggcagaggaagatacatctctgctgctccaggcgctgaaaccaagtaccgcagtgcaagcagcgcctccagcctcttcagcccgagcagcactcttttctcttgctctcgattgcgaaaaggaatgcctgacgccatgccttctggcacgaacaggcttttggaagatttttgaaacaaccggtaccccaatttacaactgcgggagattgctggacatataatggaattttcccaagaccagcatgggtccagattcattcacctgaaactggagcgtgccacaccagctgagcgccagcttgtcttcaatgaaatcctccaggctgcctaccaactcatggaggatgtgtttggtaattacgccattcagaagttctttgaatttggcagtc

SEQ ID NO: 35030 - DNA, 411 bp, Homo sapiens
gggttagtgcttacattttagtctttttctccctcaaaaaaatatgttaagtttcagtgccagctagaaaatactgctttctgccatcgattgggggtggtttttgtcaaatatactgttgataaatatttatttttgtaaacttgaagtgtgtggtggccgtgggggagggacatgctggcagcaggcgccttcttcagctgtgggtcctaaaggcctttgatcctttgaagaagaaagacatggtatttgttcagcagacgccgaccactcaaacggaggggcccctgggattccctgtctcagatggcctggtcttacgcctgtgtagatttcttctccattgggaatgaaggtgtcaggtgggactggaacgttctagatggtatgttccgtgatattaacaacttt

SEQ ID NO: 35031 - DNA, 414 bp, Homo sapiens
ggctcgcaagcgaggcagccatgtcttatcccgctgatgattatgagtctgaggcggcttatgacccctacgcttatcccagcgactattatatgcacacaggagatccaaagcaggaccttgcttatgaacgtcagtatgaacagcaaacctatcaggtgatccctgaggtgatcaaaaacttcatccagtatttccacaaaactgtctcagatttgattgaccagaaagtgtatgagctacaggccagtcgtgtctccagtgatgtcattgaccagaaggtgtatgagatccaggacatctattagaacagctggaccaagctgactgaaagattcttcaagaatacaccttggcccgaggctgaagccattgctccacaggttggcaatgatgctgtcttcctgattttat

SEQ ID NO: 35032 - DNA, 412 bp, Homo sapiens
gggcggcgctgacgagagtcctggtcagctgagtggaaatagaaggatttctgctgccatcatcttccatgggctttgcaggtcacacgacctacaagtagggagcagggaaagaagagtgagcctgcatgccaattctaagctcttcaggatcaaatgtcgttcgtcctgtccagaatggcagcctgtggaggcacctgcaagaacaaagtgactgtgtccaagcccgtgtgggacttcctgagcaaagagaccccagcccggctggcccggcttcgggaggagcaccgtgtgtccatcctcatagatggcgagacttctgacatctatgttctccagctttccccacagggtcctcccccggcccctccaaatgggctctacctagcccggaaggctctcaaggggctgc

SEQ ID NO: 35033 - DNA, 415 bp, Homo sapiens
  misc_feature (1)...(415): n = A,T,C or G
gggcggcgcttacgagagtcctggtcagctgagtggaaatagaaggatttctgctgccatcatcttccatgggctttccaggtcacacgacctacaagtagggagcagggaaagaagagtgagcctgcatgccaattctaagctcttcaggatcaaatgtcgttcgtcctgtccagaatggcagcctgtggaggcacctgcaagaacaaagtgactgtgtccaagcccgtgtgggacttcctgagcaaagagaccccagcccggctggcccggcttcgggaggagcaccgtgtgtccatcctcatagatggcgagacttctgacatctatgttctccagctttccccacagggtcctcccccggcccctccaaatgggctctacctagcccggaaggctctcaaggggctgctan

SEQ ID NO: 35034 - DNA, 412 bp, Homo sapiens
ggttgaaactggtccactatgacgcagcaggggcagtttggcagagcatcctcttcccttgtccttgtgaaagaacacaggaaacatttgggttttacagcttttcacaccctactatcaggcatcagaatcaaaattagttactaaattgggtgaatttttggaaacctgcatttctatgcatctgctattccagaaaaaaatgggaatgtattacaggagagttacctcacagtgtcttatgttgtggaacctgaaacataaccacgtgttttcttatatgatcatttgtgttgatactgcttttatttgagtttatgaacagaaatagaaagtatggtgcttgggttttgccctttcttactcctgaaagttaaatcagaagacactgatttcattttgtgaaatttat

SEQ ID NO: 35035 - DNA, 436 bp, Homo sapiens
ggggagtgtccagtttgcagcattttctgaaaatctcaaaaaaatccaataggcagcctttctaacaacatgataaattcagaatactatgcaagttcttttaaaaataattgctattcttatacaaattgctggttgggggtgggggatatattttttcatatattttcatagggttcaaatggaagtggtaaggaaatctgaatagctaatgaaatagctgtgttttgtaaaaagaaatgtaaaagctattaaaatgttacattaaaatccacttgagatgcctaaaatgtactcagcagctctttgcatgttgtaattttcatatcaaaatgctttatttacattggaagagaaatttccattacaaaacaaaaactgacatgaacgattatttcaaaatagtattttgtagctaatttttaaaaatttggag

SEQ ID NO: 35036 - DNA, 403 bp, Homo sapiens
ggcagtccgctggtcccgagcacgagctgttgagttctgcagttgatcatggttccgatgaagttaaattccgtcaagatttaatgaatattgcgggcacaacattatcctcaaaacttcttactcatcacaaagaccactttacaaagttagctgtagaagcagttctcagactgaaaggctctggcaacctggaggcaattcatattatcaagaagctaggaggaagtttggcagattcctatttagatgaaggcttcctgttggataaaaaaattggagtaaatcaaccaaaacgaattgaaaatgctaaaattcttattgcaaatactggtatggatacagacaaaataaagatatttggttcccgggtaagagttgactctacagcaaaggttgcaga

SEQ ID NO: 35037 - DNA, 456 bp, Homo sapiens
  misc_feature (1)...(456): n = A,T,C or G
nttgagaccgttgtgacnctcattacgccaagcttggcacgaggtggctatctgccaccccgactccatcactaccattaagcactggataacaatcatccgggcgaggtttgaggaggtgctggcctgggcaaagcaacatcagcagagattagcaagtgctctggctgggcttattgccaaacaggaattgttggaagctttgctggcttggttgcaatgggctgaaactacacttactgataaggataaagaagtcatcccccaggagatcgaagaggtgaaagcactcattgcagaacaccagaccttcatggaggaaatgaccagaaaacagcctgatgttgataaagtaacgaagacctataagaggagagctgctgatccttcctcattacaatcccatattccagtcttggataagggacgagcaggaagaaaacgctttccagcatg

SEQ ID NO: 35038 - DNA, 370 bp, Homo sapiens
  misc_feature (1)...(370): n = A,T,C or G
cccccgttcgagagttgtgtttttttgttgcgcccacacacgcccaggagactttcccgccccgggcgctccttgacacattggtttgacacactccaagcnggcacgagggaacctgaaccgcgcggccgaaccctccggggncccgacccatgctaagcttgagcatggctgagcaggagcccacagccgagcaggtggcccagattgcagcggagaacgaggaggatgagcactcggtcaactacaagcccccggcccagaagagcatccaggagatccaggagctggacaaggacgacgagagcctgcgaaagtacaaggaggccctgctgggccgcgtggccgtttccgcagaccccaacgtccc

SEQ ID NO: 35039 - DNA, 446 bp, Homo sapiens
  misc_feature (1)...(446): n = A,T,C or G
cctcgaccanntnngttnganggacattcgaaaccacgannacnccaagcttggcacgaggagggcggtgagggggaccagcccctcttatggtatccttggtttcacgggatgctctctcggctcaaggctgcgcagctggtgctgactggcgggactggctcccacggtgtcttcctggtgcgccagagtgagacaaggcggggtgaatacgtcctcaccttcaacttccagggcaaggccaagcacctgcgtttgtcgctgaacgaggagggtcagtgccgggtccagcacctgtggttccagtccattttcgatatgctcgagcacttccgggtgcaccccatccctttggagtcgggaggctccagtgatgttggccttgtcagctatgtcccatcctcccagcgacagcagggtgagcagagcaggtctgcaggggaggg

SEQ ID NO: 35040 - DNA, 413 bp, Homo sapiens
  misc_feature (1)...(413): n = A,T,C or G
gggtgtggctcccgaggagcaccccgtgctgctgaccgaggcccccctgaaccccaaggccaaccgcgagaagatgacccagatcatgtttgagaccttcaacaccccagccatgtacgttgctatccaggctgtgctatccctgtacgcctctggccgtaccactggcatcgtgatggactccggtgacggggtcacccacactgtgcccatctacgaggggtatgccctcccccatgccatcctgcgtctggacctggctggccgggacctgactgactacctcatgaagatcctcaccgagcgcggctacagcttcaccaccacggccgagcgggaaatcgtgcgtgacattaaggagaagctgtgctacgtcgccctggacttcgagcaagagatggccacggctgctn

SEQ ID NO: 35041 - DNA, 425 bp, Homo sapiens
ggggacaatataaaaaagaaccttctgaacacttacttagcttaaagacatgaaagacccagtgagtttttattgaatagtctctcttgtgttaaaagtacatattcaggactatactatgttgtatttggaaatattctgatgtgtttaatacaaattcgtagtgtattcagagcattgtatgtgtctcaccaatggtacacatttggattaagcagtaataaggcctataaaagaagaaatgaaacaatagttttcaacaataaatgcaggaagaaaaactgctgatggacccaactgagaaaatgtccttttacactatcccttggtggtcagtctccctgaatctggtgtgcttataattgctgggaaggcagtgtaaacctgtggccattcctatgcatgtctgggaggaccacagccct

SEQ ID NO: 35042 - DNA, 425 bp, Homo sapiens
gggctacaacagaacttcagacagcaaagtcctgacatgtgcagccgtgtggaggatgccgaaggaattggaatcaggcagccacgaatcccctgatgattcatccagcactgcacagaccctggagctgctctgtcaccttgacaacacagcccatggcaacatggcctgtgtcgtgtgggagccaatgggagatgggaagaaaatcatttccttggctgataaccatatcctgctgtgggatttacaggaaagctcgagccaagctgtgctggccagctcagcgtccctggaagggaaaggacaactgaagttcacctcaggacggtggagcccacatcataactgcgcccaggtggccacagcgaacgacaccaccctccgtggctgggacacccggagcatgagccagatctactgcatag

SEQ ID NO: 35043 - DNA, 427 bp, Homo sapiens
ggggtagctaatttcccatttacaacacagaaatgatttagagctagtttgctccaactctttaagttgaagcagtgtgcaaaaggaagaaaagaaatgtttaatgttcagacctgccaagagcctccaacagggctcaagaaacatataaatcccatgagcacagccttgaaaaccagtttgactcaagccttcgggcctcagttcattgaccagatgacagccacgtgatgattatggaaggacggatgcattgcgattctgcttacacatcgggttatcaaagcgagtcacttgttggaaccatgatgctcgacctccttcaaagccgtttgcactggggcttgagtttccaagattcacaacaggtgtcagcctctgagaaccctcatagcgtgtgttcttcaacctggcacatttgttcctt

SEQ ID NO: 35044 - DNA, 418 bp, Homo sapiens
ggggaagatttgataaaggggaaggcactgtttgaggatgtccctgtgttactcactgaggcagagaagaaggaatgggttgagaaactgactgaagtttctatcagctctgatgccttcttccctttccgagataacggacacagagctaaaaggagtggtggggcgtacattgcggctccctccggttctgctgctgacaaagttgtgattgaggcctgcgacgaactgggaatcatcctcgctcatacgaaccttcggctcttccaccactgattttaccacacactggtttttggcttgcttatgtgtaggggaacagtcacgcctgaaactttgaggataactttttaaaaaaataaaacagcatctcttaatcactggatccagagcttttggtaggtgtgttctatgataa

SEQ ID NO: 35045 - DNA, 407 bp, Homo sapiens
ggaagatgtgaaggttgtcatcctgggacaggatccatatcatggacctaatcaagctcacgggctctgctttagtgttcaaaggcctgttccgcctccgcccagtttggagaacatttataaagagttgtctacagacatagaggattttgttcatcctggccatggagatttatctgggtgggccaagcaaggtgttctccttctcaacgctgtcctcacggttcgtgcccatcaagccaactctcataaggagcgaggctgggagcagttcactgatgcagttgtgtcctggctaaatcagaactcgaatggccttgttttcttgctctggggctcttatgctcagaagaagggcagtgccattgataggaagcggcaccatgtactacagacggctcatccct

SEQ ID NO: 35046 - DNA, 407 bp, Homo sapiens
ggtcgcgctgtaagaagcaacaacctctcctcttcgtctccgccatcagctcggcagtcgcgaagcagcaaccatgcgtgagtgcatctccatccacgttggccaggctggtgtccaaattggcaatgcctgctgggagctctactgcctggaacacggcatccagcccgatggccagatgccaagtgacaagaccattgggggaggagaagattccttcaacaccttcttcagtgagacgggggctggcaagcatgtgccccgggcagtgtttgtagacttggaacccacagtcattgatgaaggtcgcactggcacctaccgccagctcttccaccctgagcaacttatcacaagccaaagaagatgctgtcaataactatgcccgagggcactacaccattgga

SEQ ID NO: 35047 - DNA, 411 bp, Homo sapiens
ggcttgactctgctgagaaccgtgggggccgaatactgcttcccacccatccacggggtccccgcggagcagggctctgcagcgccacatcatcccttctccctggaaagagctcagcccccaccgatcagcctaaacaacctagaactacaggatctcatgcacatctcacgggcccggaagccagcgttcatcctgggctccatgagggacgagaagcggacccacgaccacctgctgtgcctggatggaggaggagtgaaaggcctcatcatcatccagctcctcatcgccatcgagaaggcctcgggtgtggccaccaaggacctgtttgactgggtggcgggcaccagcactggaggcatcctggccctggccattctgcacagtaagtccatggcctacatgcgc

SEQ ID NO: 35048 - DNA, 469 bp, Homo sapiens
cattgataccgatagaccaccattacgccaagcttggcacgatgcattttaagagcaagcaagacacatgaaattaaacctacacggaggtatttgtggctggtgccaaagcattctgacactttggggtgtcattttaatcaaagaaatcaccccgccacctcaccgggattctccataacttccctctgcagaactaattatgttgattttgttcaagttcaagatgttagctaaaagaactatggtggggttttttttcccacttcccacaaacctcaacatgtgccagtcaccctaaaatgcttcacatggttaaaaacaagcacaattttgaatcctacagcaaggatgaaaggcccctagccgagaaaacagtgctttggggagcagttgtcagtctaagtgatgctattccaagagaaggatatgctgagggaaaatgcccacatgacctgttcccatttgg

SEQ ID NO: 35049 - DNA, 499 bp, Homo sapiens
agtgcccctttgaatcatggcactgacacgccagcttggacgagggagtttcgctcttgttgcccaagctgcagtgcaatggcatgaactcagcttaccgtatcctctgcctcccagggtcaagcgattctgcttcctcagcctcccgagtagctgggattacaggcgtgcaccaccatgcctggccagttttgtatttttagtagagacagatttctctatgttgggcaggctggtctcaaactcccgacctcaagggatccacccaccttggcctcccaaagtgctgggattacaggtgtaagctgccgcgcccagcctatttttttttaacttcaaatactattattttaaatttatgttcattatgtaattcaaggagtaacgatgcctggagcaatttctgaaatattttcaaaccactccactcttgacactacagatttttctctcaggctcaatccgaaactctgcaggcattattttggtttaaagaggg

SEQ ID NO: 35050 - DNA, 408 bp, Homo sapiens
ggcgagatcaaaccctacggacttgactgggcggagctcatccgggacctcaggaagacgtgtgaggagcagaccctgagtatcccctacaacgactatggggacagcaaagagatctagcaccataaggccagggagctgctgccagaatgaagtaggaaagaggagggatccatctgggttggtctgtggatttttaatattttttaatggaacatgaaaacctccacagcaacatcgaaaccagggagaaagtgatccttgctccctgcagaacttcttcagtatgatgttctccatctgcatgattgggaaatctgccagccagtggcttcatgcagtgccatatttctttagaggattactttggggtttgctttgccattaatttggtccattcattttttt

SEQ ID NO: 35051 - DNA, 470 bp, Homo sapiens
agaaaagaaccaactggaaaccgctaatagatgaccatcttcagcattgagacgagggtttaccatagaattgttggaaatactgaagacaggtgcaatttactaaacttttgtttttaaactattgtagaggctgcattagaagaaaatgtttataatgacagagcaactatgactatataaaaaagctgaaattagaactgtgtttagaaatagatcagtaacccagtgccaaggatgccaagctgccaccatggtcttggctctcccacaacccagtgtttctggggtaagtttcacagtttctaggccctggaatagcaggcagtgtaagcctttgataactttagttcgaagtttttcttgtttttgtttggtgagttggtgcatatgatagtgggtgttatgctattttgctcttcccatcaaaataaagaaacttccagaggtttactgttaaaaatactgat

SEQ ID NO: 35052 - DNA, 391 bp, Homo sapiens
ggcacgagcggaacgtctgagggtatcaataagctcctaatccacacgccatgggtcattccacagaggaggacaaggctactatcacaagcctgcggggcaaggtgaatggggaagatgctggaggaaaaaccctgggaaggctcctggttgtctacccatggacccacaggttctttgacagctttggcaacctgtcctctgcctctgccatcatgggcaaccccaaagtcaaggcacatggcaagaaggtgctgacttccttgggagatgccataaagcacctggatgatctcaagggcacctttgcccacctgagtgaactgcactgtgacaagctgcatgtggatcctgacaacttcaacctcctgagaaatgtgctggtgaccgg

SEQ ID NO: 35053 - DNA, 473 bp, Homo sapiens
  misc_feature (1)...(473): n = A,T,C or G
nctgaaaacatttgtgaaccntattacgccaagcttggcacgaggctctcgtgccaagcttggcccgaggtaaatatataaaaataaaaaatacctactataggccagctaccgtgcaaggggctgacatgcacaaatggatgaggatgcaccctgcccttgaagctatgagggaaaaagtttgcagtgctgtccatatgctcatccaggtcattaataacagaatgaaacaggtcaggtggagccaaggacaaagtcccattattgtgcccaaccgggaacctagcccttcatctggctaggaatggtgtgatgagacctaaaaaaatgacctaggaaaactcacagctgagacatattacctaggggtccaaggcaatatccaagagaatgatcagttatccggccgaaggagcaagaggacccaccaaaagaaatggacaggtaaccagagaagtatgggaagaaactgg

SEQ ID NO: 35054 - DNA, 366 bp, Homo sapiens
ggcacgagaggaattagaaaggaagggaaattgaaaggaaagtgcacttcctctccctctctcagccctttctgggatttccctgcactcagcaccagtggaaggcagatgggtacccatggcctggaccatgctctgctttttctctgttcttcccattcctgagagtgcacttagaaactggactgttgttgtgcacttgtctgattcctgctaccaccctttcaaaacaggaccaattttgtaatgggaaattgactatctcaggtgccgacatgatgaaggtatagcttgttgtttggtactaacatgtctccaggcgggaatggacttggagtatgccttggctgagtttggatgccagtt

SEQ ID NO: 35055 - DNA, 385 bp, Homo sapiens
ggcacgagcgaggggagtattaagagcatctcggaattcttggtcctgttatcagagctgaagtggaggatgttatccacgttcggcttaaaaagttagcatccagaccgtattctctacatgcccatggactttcctatgaaaaaacctcacagggaaagacttatgaagatgactctcctgaaaggcttattgaagataatgctgttcagcccaattgcatttatacctacttaaggcatgccaatgagggatcatggtcagaaagtcctggctctgcctgtagggcttgggcctactactcatctgtgaacccagaaaaagatattcactcaggcttgatatgtcccctcctaatctgccaaagaggaatactacatacgga

SEQ ID NO: 35056 - DNA, 383 bp, Homo sapiens
  misc_feature (1)...(383): n = A,T,C or G
ggcacgagcaggatggtctaccgggactggtggaactcaacgtccttgtccaactactaccgcacttggaacgtggtggtccatgactggctgtacagctacatgtatcagaatgggctgcggatccttggtgcccggtcccgaggggtaaccatgctgggtgtggtcctggtctccgcattggcccatgagtatatcttctgcttcgtcctggggttcttctatcccggcatgctgatactcttccttgtcattggaggaatgttgaacttcatgatgcatgaccatcgcaccggcccgggatggaacgtgctgatggggaccatgctgtttctaggccaaggaatccaagtcagcctgttctgacacgagtggacncacgg

SEQ ID NO: 35057 - DNA, 490 bp, Homo sapiens
aggagagcaaaatttgatacccttgatttgataacagcatcatggcacgaggaacacttactacctggtgtatgaaattggacctgaactgttggatttttctagttgccgtcaaacaaggcaaaaaaatttaaacatgaagcacacacacaaaaaaggcagtaggaaaaatgctggccctgatgacctgtccttattcagaatgagagactgcggggggggcctgggggtagtgtcaatgcccctccagggctggaggggaagaggggccccgaggatgggcctgggctcagcattcgagatcttgagaatgattttttttaaatcatgcaacctttccttaggaagacatttggttttcatcatgattaagatgattcctagatttagcacaatggagagattccatgccatctttactatgtggatggtggtatcagggaagagggctcacaagacacatttgtcccccgggcccaccacatcatcc

SEQ ID NO: 35058 - DNA, 507 bp, Homo sapiens
  misc_feature (1)...(507): n = A,T,C or G
cgccccccccgccaaattttgaaaaccctatganctggattaccgctatcaccatgacgacgccaaggttgtgcacgaggccctgctaaataggtggctgaggcaaggtgtaatgcttgaatccttgaggtagaagttgcagtgagctgagattgcgacacggcactccaacctgggcaagagagcaagactctgtctcaagaaacaaaacaaaaaaattaagctgacgtggtgggcgcttgtggtcccagctactcaggaggctgaggcaagagaatggcgtgaacccgggaggtggagttgcagtgagccgagatcgtgccactgcactccagcctgggtgaaagagtgagacttctcaaaaaaaacacaaagtgtccactcaataactttgcttgaaactgtcttcatgttcttcacttcacaaatataaagctgttacagtggactttgtgaggttccatgtttttggtcagccataagaggaagaataattcagagtgagag

SEQ ID NO: 35059 - DNA, 440 bp, Homo sapiens
ctacacataagaatcacatgaagaacttaataagattctgtgtgttggggcctagtttactgaaaaattgctcagttgtgtctaatatgcaagacaggatggaaaacgactgatctaaagtaaagatcttgtgttgtaatctaaattcttctcataatgagatctattattaatcttcagtacttggcatataatgggcacccagcataagaaaatctggatagctgctacataaaaatgtcagtcaggcttgaaaagatcccctgtgctagctggcttgcttactgcaccactggcctctcatactcaaatacaaaaacatatattatacatatatgtgtaccctttttgtgttatctatgttccacagcccaaaaccagactctctgatagaaaattgaataaatcatgttgcagttacttctctggtttaaaaacaa

SEQ ID NO: 35060 - DNA, 484 bp, Homo sapiens
  misc_feature (1)...(484): n = A,T,C or G
cattgacagccncttgatttgagacacgctcagctnggcacgaggaccgggacccggggtctgctcctgtcgccttcgcctcctaatccctagccactatgcgtgagtgcatctccatccacgttggccaggctggtgtccagattggcaatgcctgctgggagctctactgcctggaacacggcatccagcccgatggccagatgccaagtgacaagaccattgggggaggagatgactccttcaacaccttcttcagtgagacgggcgctggcaagcacgtgccccgggctgtgtttgtagacttggaacccacagtcattgatgaagttcgcactggcacctaccgccagctcttccaccctgagcagctcatcacaggcaaggaagatgctgccaataactatgcccgagggcactacaccattggcaaggagatcattgaccttgtgttggaccgaattcgcaagctggctgaccagtg

SEQ ID NO: 35061 - DNA, 431 bp, Homo sapiens
ggggcttggatggtggcttcctctcctcagccgagaatgacttcgcccaccggatccaggaggaactggaccgctttctgctgcagaagcagctgacaaaggttctttttttccccccactctccagacgcctacggtacctgatccatagaacagcagagaattttgatctcttgagcagcttctccgttggggagggctggaagaggaggacggtcatctgtcaccaggacatcagggtacccagttcggatggcctctctggcccctgccgcgctcctgcctcctgccccagcaggtaccacggtcctcggcccatctccaaccaaggagcaactgcggttccccgaggtgcccgggctggccggtggtattgtggacgcaagcctgaccagcctttgtatgtgccccgggtgctgcgcacgcatgag

SEQ ID NO: 35062 - DNA, 494 bp, Homo sapiens
  misc_feature (1)...(494): n = A,T,C or G
cggcccaggcaattgagagctnttgaattgagaaccctcagcanggcccgaggacttcccggnggagggaggaacccagcaacacgctcctgacttccctttccaaggactcgacctgagaaccgccatgtactcggagatccagagggagcgggcagacattgggggcctgatggcccggccagaatacagagagtggaatccggagctcatcaagcccaagaagctgctgaaccccgtgaaggcctctcggagtcaccaggagctccaccgggagctgctcatgaaccacagaaggggccttggtgtggacagcaagccagagctgcagcgtgtcctatagcaccgccggcggaaccagctcatcaagaagaagaaggaggagctggaatccaagcggctgcagtgcccctttgagcaggagctgctgagacggcagcagaggctgaaccagctggaaaaaccaccagagaaggaagaggatcacgctcccg

SEQ ID NO: 35063 - DNA, 423 bp, Homo sapiens
ggagagagaggagaatccccaggcagagtgggaggaagaatgcaaatcaggcgctggggaagaaatgcactggggaggaagcctgactagggtggcgtcctggaggccccagagcacagcccatcagagaggatgccctgctggcctggctgggttcagctgatcgcagccgcctggctcttgcatctgcacttggccatagggcggccaggcggctctgctggccctgactgggctcacacacgcgtgtgcctggggtccgcagccggagactgattgagaatggtcttggaggcagctgcggcacctcagctttgctttctgtgtctgagcccagcacgccagcctgggcatggcgttctcgcgacagcagcagagggcaacagcaagacaagcccaggcgcatgagttcatttcagcctg

SEQ ID NO: 35064 - DNA, 413 bp, Homo sapiens
ggtggcacgaggagcataagggaggggcataagttacatcgttttgtgctgcttgagaactgtcttttaaaattgatcacaacgagggaaaacaaaataaaattagggggcaaagggtaggagtatggggggaggggagagcaaacctatcgaatatatcttagaattttgctcagaaatcactgctgcctctcaagtgttgcattgtccctgcctaaaccaagaaggctaaacaaagcccctcctgtttgaattcttaaggtaagaaatttctaagctaagaaaacactattgcctaaaaccaatgatagtggagctcatttacaaataggcatgcctcacacacacagtccaaaggcaagacactggctttgaaattaggctcatgatgtgattcctattatatgtacctg

SEQ ID NO: 35065 - DNA, 484 bp, Homo sapiens
  misc_feature (1)...(484): n = A,T,C or G
cattgacagctnttgaatggatcaccctcagctnggcacgaggcagnttagcagttaaaagtgtatttttgtttaatcaaacaataataaagagagatttgtggaaaaatccagttacgggtggaggggaatcggttcatcaattttcacttgcttaaaaaaaatactttttcttaaagcacccgttcaccttcttggttgaagttgtgttaacaatgcagtagccaccacgttcgaggcggtttccaggaagagagtgcttgtcatctgccactttcgggagggtggatccactgtgcaggagtggccggggaagctggcagcactcagtgaggccgcccggcacacaaggcacgtttggcatttctctttgagagagtttatcattgggagaagccgcggggacagaactgaacgtcctgcagcttcggggcaagtgagacaaatacagctcctcgctgcgtctccatcaacactgcgccgg

SEQ ID NO: 35066 - DNA, 417 bp, Homo sapiens
  misc_feature (1)...(417): n = A,T,C or G
gggccagaactgatttcttgccatctcaaggccttagggctgtggaaataaatgatcaaccaaatgagaaaaggaaaggctattcttagcttactataccaagggagttagccaccatcacctgggttttggcagaaagtcaaaggcgggcagatgggtggaaaagttttatagcagaaaaaagggaagccttcagatatgccctggttgaagactgttggcatagggaagccagaagcaggttgactggagtcagtgtttcacagtgggcaggtctgtgtaatcctacatcaaagtctaaggaagttgagaggccaaagaggcacccagtttcttagaaagaaacatttaatagggatttaggaacagaagccgtgactatatcttgggcagtgatgaggcaagttggtggatccn

SEQ ID NO: 35067 - DNA, 449 bp, Homo sapiens
  misc_feature (1)...(449): n = A,T,C or G
naagcgagggcgtgncctgaaaacttgatgacttcattacgccaagcttggcacgaggctcccttctgataagactggaaaatagtcctccaaaacacaagggaggattttgggtggccaaagtgtacaattttcatcccacaattgaaatttttaaatcatttcatgttagtcttaccgaataaggtaccaagatcacaaatagtgttgatcagatcttacaagtttatgtggcacacaatcctataaatgtgatttttttatataagttaaagagacaaatagtaggctaaaaacattttaaaatcaacttttgaaatttaaaaatctttcagaatacaattcagttttagtttcaaaatgttaacaacttgaattacaaccggttatcagttggacagtaagaatttatccctttctcttctgactgggatacctatttcattagn

SEQ ID NO: 35068 - DNA, 433 bp, Homo sapiens
ggctcagctgtcgtccaagggagtaggctataagggatggcgggacgtcacctcctttttttccgggaaagcagagggccccttggacaggcccttggagggccacagttatcataacagcggactggaccgctttctaaacagcaccatagaccagagcttctgggagacctttggaagtgctgggcccaccaagacccgaacgtccccgagcatcgacagatggacgtgcgcggacacctccaccgaaaggaggagctcggacagctgggaggtgtggggctcggcctgcaccaacaggaacagaaacagcgactggggttagggcggggagggcaccaataaagcagtgccttcctacgagcccactgaagattgctgggacaaccaaaactgggaagggccactgtgcccccgttcccaacgcccccgg

SEQ ID NO: 35069 - DNA, 479 bp, Homo sapiens
  misc_feature (1)...(479): n = A,T,C or G
gaggggccnncccnattgaaatcgatttcacctgacnacgccaagcttggcacgagggcagaattcgacaacacatgtccattcagccctctgaatggatcttagactaagacctttttaaagatatgtctgtattgaagagaaagccagctttgagggtttgacacttgcacatcattatctgtgccgtcctgactaaaaggttgtctgggcccccaaattccaagtcccagtatagccagggctcccattttgtttttccagagttcgtggaggtggactgcagagcccagagcccttcatctctctgagggtcaaggataccaggggtcccaagtcacagatagacattccagattgtattcttaggaatcattcttaggcagtgcggcagaagcaggcctctgtgaagtgtctgccgggtagaaataggccttgaagtcctggcgctctccaagcagtggggttatgtgtcgact

SEQ ID NO: 35070 - DNA, 487 bp, Homo sapiens
  misc_feature (1)...(487): n = A,T,C or G
catcgaaaccntngaatagaacaccgctagctnggcacgaggaaaaggagtgagaagacaaagccgtcaaagccccaacagctttgtatttctccagcccggcgcagaccccggagctcccgaggcactccctccatctttggaacacgccagtaattgattgataacaggaagctatgagggaccctgtgagtagccagtacagttcctttcttttctggaggatgcccatcccagaactggatctgtcggagctggaaggcctgggtctgtcagatacagccacctacaaggtcaaagacagcagcgttggcaaaatgatcgggcaagcaactgcagcagaccaggagaaaaaccctgaaggtgatggcctccttgagtacagcaccttcaacttctggagagctcccattgccagcatccactccttcgaactggacttgctctaaggccaagacttctctctcccatcaccttgccctcattg

SEQ ID NO: 35071 - DNA, 430 bp, Homo sapiens
ggccctttaatatactcaccttttggaggaataatagctgtaacatgtatgtaggaagctttaccagtcaagtattatggtatagggcaggactgcaaaggaccctgttgtcatctgcatcctgctgcctcttcagcagggatgggagaaaagaaaggggagcaaaggatgttctgctggcagtgtgcctgggagctcacatgtttaaggactggacagttcctacacagatgctccttgacttatgagattatatcccagtaaacccatcgtaaagtcaaaaaattgtaagttgaaccatcagtaatcagtgttctttctcaaagacatgaccgcagttaaggggcgctaagtagaggtgtcctttgaggtcagctttgctgaccttcctctggctggggtcttgtggccctgctagcatgtgcctgct

SEQ ID NO: 35072 - DNA, 472 bp, Homo sapiens
  misc_feature (1)...(472): n = A,T,C or G
agggcgggggggnggcactgataccttgagaancttcttacgccaagcttggaacgaggcttttcttaaagaacaaatacagttatgcttgtaacacatgctttaaacccttggaatcctcccatgcatattctagcagactggtagaaagtggaccagagacacagttacacttcgatcatagaaaatgtttggttacttgagtctgtcggaaaacatgatgccagccttccacaatagaactaagcaactccaattttatcattatgatggacattgaggttggttatagttttaaaaataccctttattgaacctgaaatttgtaaatgtttattatagaaaatttggaaaatacatttaactaataagaataaaatgaaatctgtctatacccatttcccttttaatcactttaaatattttgatgtatttccttccatctattgtactttcatatgtacacaagttn

SEQ ID NO: 35073 - DNA, 470 bp, Homo sapiens
  misc_feature (1)...(470): n = A,T,C or G
nggtaggggnnnnnacactgataccttgtgaancttcttacgccaagcttggcacgaggggagaaacaagagttgaaataaaagaatctgttcgtggccaagatattttcattatacagacaatacccagagatgtgaatacagctgtgatggagttgctcatcatggcttacgcactgaagactgcctgtgccaggaacattattgggggcatcccctacttcccctacagcaagcagagcaagatgaggaagaggggttccattgtgtgcaagctgctaacatccatgctggcgaaagcaggtttaactcacattatcactatggatcttcatcaaaaggaaatacaaggctttttcagctttcctgtggacaaccttatagcctcacctttcctgcttcagtatatccaggaagaaattcccaattacagaaatgcagncattggagctaagtcttctgatgctgca

SEQ ID NO: 35074 - DNA, 406 bp, Homo sapiens
  misc_feature (1)...(406): n = A,T,C or G
ggtggtgaatctttaacattacctggtgtgttccctaacattcaaactgtgcattggccatacccttaggagtggtttgagtagtacagacctcgaagccttgctgctaacactgaggtagctctcttcatcttatttgcaagcggtcctgtagatggcagtaacttgatcatcactgagatgtatttatgcatgctgaccgtgtgtccaagtgagccagtgtcttcatcacaagatgatgctgccataatagaaagctgaagaacactagaagtagctttttgaaaaccacttcaacctgttatgctttatgctctaaaaagtatttttttattttcctttttaagatgatacttttgaaatgcaggatatgatgagtgggatgattntaaaaatgcctctttan

SEQ ID NO: 35075 - DNA, 415 bp, Homo sapiens
ggaccgggtgtcagagcatgttgtgagcacctctacctgggtgtccccctagggctacagctgctctcaagggcacttcctctcacacagacaggcagtgaaactcatgctgaggactcatcttctgtacacacttttaagaacttctacttccaaagatacaatgaagttaataaatgaagcaaagcagatttctagactaggcttcacatagggtggcttgcagcatttagaagcatttctctagacaccacacctattttccaactgtaatattctgtatagaatgcaaatgttcagactttgcttttcaaaaacgttgtatggttcacagctgaagagagaatagttgagagttgagtgatctatccttcaaactacaggcatgatattccttcacttgccagcaaccctt

SEQ ID NO: 35076 - DNA, 414 bp, Homo sapiens
gggctgatacaaatcattaggaacataaaacactaatagatgagaacagagaagtcacagaagaacccaaatgtttaagctttctagaaacaagagaaataacctaaggtggcatatctaaaaaaaaattttaacagctttttctgattgattataaaaataatgcctgtttacagtagaaaatgtggaaggtaaaattgacccactaggtcaccatctagaaatgaccaccattaacatttactgtatatcctgcaactgttggttactctgcctttttctttttaaattaagatcatattgttggcatctcattttccacctatcaaattaacaaagctttttttttaaagcttatactccatgctggtgacagggtatacagttcagtcaatgttggtgcaattgaattgg

SEQ ID NO: 35077 - DNA, 454 bp, Homo sapiens
  misc_feature (1)...(454): n = A,T,C or G
cgggtcccccttgagaccntnngatagatgcaccatctatgaccatcattacgccagcttggcacgaggggggagaagccgggaggactgggtgcgcctgcagggatcggaagccggttggggtgtgagagggtttctcgctctagggagattcttcaagcaatcactatgtcaacagacacaggggtttcccttccttcatatgaggaagatcagggatcaaaactcattcgaaaagctaaagaggcaccattcgtacccgttggaatagcgggttttgcagcaattgttgcatatggattatataaactgaagagcaggggaaatactaaaatgtccattcatctgatccacatgcgtgtggcagcccaaggctttgttgtaggagcaatgactgttggtatgggctattccatgtatcgggaattctgggcaaaacctaagccttagaaan

SEQ ID NO: 35078 - DNA, 481 bp, Homo sapiens
  misc_feature (1)...(481): n = A,T,C or G
attgaaacccttgttgagacccctccagcttggcacgaggacgggctctgctctgtaaactcaaatgtgtagagtcagcaacaattccgtagcttccaactgactcagaattgatgcaacgtaggtcttctggcccgaggcaggaatcaagtccaaatcataaagaacttttcaccagtttcaaccagtttcttaaaagagagcttaagtcaagatttcatcaagacttgtgttttcccatgaatgtgaatctttcaatggctgttggagtatgtatgtactgctcttgcattctgaaggagntaaagaactctataaagtactgattggccatctggtgtctatggagaaagaagtcctcacgtttgagggctgtacagtgaggccatcttgtagcagcgcatacagctctaccaaggcagtcctctggttcttttttctaagctacagnggaaatggcctaatggttaaaactgtggan

SEQ ID NO: 35079 - DNA, 385 bp, Homo sapiens
ggggtcgtgccacttacatcgaccgcctaagagtcgcgctgcttgaagcaacaacctctactcttcgactccgccgtgagctcggcagtcgcgaagcaacaaccatgcgtgagggcatttgcatccacgttggccaggctggtgtccaaaatggcaatgcctgctgggagctatactgcctggaacacggcatccagcccgatggccaaatgccaagggacaagaccattgggggaggagatgatttctttaacaccttcttcattgagacgggggctggcaagcatgtgccccgggcagtgtttggagacttggaacccacagacattggtgaaattaggactggcacctaccgccagctcttgcaccctgagcaacttattat

SEQ ID NO: 35080 - DNA, 473 bp, Homo sapiens
  misc_feature (1)...(473): n = A,T,C or G
gggagggncnnccccactgatacatagataacgtcgnggaanncctcaancttcccagntcgcagatgcccaccctctctctctgcccctgtctccttcacatatcccctaaactcgttttggcccgaaatccctgaggcccaactgccctgctgtcagcgactgcacgcctcaacaaaggcccagaaggctctgtcatcactggctgccctcagcccgccttcagctcctttgagcgctgtgttggggaactttgttgcaaggatttcgttccagaaggcaagataatgtctctgagggcttcattgtgtcacttctctttggatggcggacaccgtggccctctgctggcggaggggagccattgctgcctgccccatctctatccccagggcccatgcagtcactgagttcgccctctggggcacggcgttccctctgctcttttcctagataagcccattctctgcagg

SEQ ID NO: 35081 - DNA, 475 bp, Homo sapiens
  misc_feature (1)...(475): n = A,T,C or G
ntcgagaccctgtcgagatcactatacagtgtggnggaattccaaagctgagaagaatggtgtgaagattaccttgcctgttgactttgtcactgctgacaagtttgatgagaatgccaagactggccaagccactgtggcttctggcatacctgctggctggatgggcttggactgtggtcctgaaagcagcaagaagtatgctgaggctgtcactcgggctaagcagattgtgtggaatggtcctgtgggggtatttgaatgggaagcttttgcccggggaaccaaagctctcatggatgaggtggtgaaagccacttctaggggctgcatcaccatcataggtggtggagacactgccacttgctgtgccaaatggaacacggaggataaagtcagccatgtgagcactgggggtggtgccagtttggagctcctggaaggtaaagtccttcctggggtggatgctctcagc

SEQ ID NO: 35082 - DNA, 446 bp, Homo sapiens
  misc_feature (1)...(446): n = A,T,C or G
ggggggtnnnttcgatcgcgctcgttagtgcggtggaattcgtcaaagaaagaaagtttagaagctgagacacaaagggttgggagctgatgaaactcacaaatgatggtaggaagaagctctcgacaatacccgttggcaaggagtctgcctccatgctgcagtgttcgagtggattgtaggtgcaagatggaaaggattgtaggtgcaagctgtccagagaaaagagtccttgttccagccctattctgccactcctgacagggtgaccttgggtatttgcaatattcctttgggcctctgcttctctcacctaaaaaaagagaattagattatattggtggttctcagcaagagaaggagtatgtgtccaatgctgccttcccatgaatctgtctcccagttatgaatcagtgggcaggataaactgaaaactcccatttaag

SEQ ID NO: 35083 - DNA, 455 bp, Homo sapiens
  misc_feature (1)...(455): n = A,T,C or G
catcgatcgcgatcactagtgcgtgtggtggaattccttttaattggctattgacttaaatcctggccagagataattaattagaactcaatgaggagggaaccaaggtcagttcaagatgggctgtttagttttgaccctttccagagcaaatggctgaagagttgtaggggtgaggagggggatggggaagtgaggtggnaangnagannaaggntttttgtttgttgtttgtgagaggacaacagagaaatgtttagaggtggatggtgtttataaagactgtggttttttgctcctatgccgtatggatttatacgggacaattttctctgtgtgtttgaagtttgggaaacactgattcttttgtctttttcgcgatgaccctagcaacggcgtgaggtttctattgaccggtctcccctcattgaatatttttcaaagctgctcttcta

SEQ ID NO: 35084 - DNA, 393 bp, Homo sapiens
ctcaggaagcgcagtctggtggaagagatgagcgctgaacaaatcactaaataacacaaaacaacaatgtaagcagcactttcttgtgtaaaaaaaaaaaaaaagcacgccctggcgaaaaattttgagtctttttgccttgcctggcccaactccttttcgcgcaccggggcatgaaaatctttcctcaccctgctcgttggggaatggctgaccattgatgttgattggaaggaaaagccggggttggacccacctgggggttacacccacgggcaatggattagttggtgccgggcgtgccatgcctgtggggaccaccggttggggcaagattgggggagaaaaaggagaaactttctgcaagctttgcctctacctgaaacacttcag

SEQ ID NO: 35085 - DNA, 497 bp, Homo sapiens
  misc_feature (1)...(497): n = A,T,C or G
aggggnttnnnnttcgctcgcgatcactaggcatgtcgtggaattcgtgccttcacctgctaggtaatcttctatgccctaatgggaagaatgggagcagcagacaagtaagttcaggaaggagaaccaaagctgtgtccatgcccttgaggaaagagaaattggaccagacaagttcagtggaaactttctaatggatccatcaacttcatcttgtctaagcagagtcatagctagaagtgtgactgaaataggagaaccacgtccaggggttcaggggggattcctctgaaatcgcagctggaagcatttcgtaatagttctggtactgcacccatagatactgtcacctctactctttcttccaatcaccattagcagatgccacaggattcctacttctgaaagtttttgggccctgcaggtggaagactggagaagccaataaagtttaaggctacattttattccatccacaaatttggtgaaggaggaaa

SEQ ID NO: 35086 - DNA, 425 bp, Homo sapiens
ctataatggggcggtaggttagcttgatttaggaagttcagctatgatataatttctacctctctgtactacttctgatttttagaaaattcatattctaaatgctagcaggcttcctaagggacaggcttttttctcatgctagtcaacaaatatatcctctgagactcagtgaccactggccatttcaaacaacagaataattagcactacatcatcacatataaggtcgtaccaaacatttgtgtaacactgtgtttatgtggacttttaaaacgctggctgttctggtctcacaattaaagaattgatcttacctccttccaattaaagggagaaaaattttattagccccttttttataataatccctaactaaaataaaaaaattggttatgggtggcgcggggggccgtgaatcccaa

SEQ ID NO: 35087 - DNA, 385 bp, Homo sapiens
gttggagtttatgaatgtcacaatgctgggggaaaccaggaatgggccttgacgaaggagaagtcggtgaagcacatggatttgtgccttactgtggtggaccgggcaccgggctctcttataaagctgcagggctgccgagaaaatgacagcagacagaaatgggaacagatcgagggcaactccaagctgaggcacgtgggcagcaacctgtgcctggacagtcgcacggccaagagcgggggcctaagcgtggagatgtgtggcccggccctttcgcagcagtggaagttcacgctcaacctgcagcagtaggagggtccgggaggccctgccgtcctgtctcctgcaccattgggtggagtctggtgatcacattattgat

SEQ ID NO: 35088 - DNA, 394 bp, Homo sapiens
cacgcttggagcgcccgctacaggctatggggccggacgaaacccgctggaccctctcaagtggacgttgcagtgagcacacatcgggcgactggccgtcactagcgccttcgtcgaacctggactgcgtctctcccgatgacctttcctatgaacatgaggaacatggatcgctatgtcacgagaacggaacatactgatctggcctgttaggtataaatatgtaacaaggccatgaaagccattcttatcttaccacagggaaccatgtctctcgcagtctttctgtctttttgtccattgctgggtatatatcaatagagggccaagtcccagcccagcctgttgatacaaatatacacaataggtcagacttttttttctcttccatttt

SEQ ID NO: 35089 - DNA, 494 bp, Homo sapiens
  misc_feature (1)...(494): n = A,T,C or G
agggntcnnnttgagagccatacctatgtcgnggcattcctgaaatataaattctaaattatatttgttataactatattttatgttgtatgttatcaggagccatcacagaatgacctttttgtgtttggaacacttggttccatgaaaagtatgctttgtgttttaactgttaaaataatttaaaaattaattattttacataattaaagaagttaaaaactattaacattaaataatttcacaatttcaacatgtcaaacctatgaagggagataggaaacaatgagaaacttacttttgctcctttatacagaattattaactatattttactaactaaaaaactctagtattctttacctaaagtcaattggctggtaagagggagagatgcaaaattctccagctctgaacttggagctacttcacactctactcttaatggaaacttgaactaatgatagatagtatttttttcctctatttaaaat

SEQ ID NO: 35090 - DNA, 424 bp, Homo sapiens
ctggcttctcactctgccttatatttccatgtgggtttacttctctcataactactttcaaggtatttttcttccaagctgaaataaaactggggccacatattttcagtcatttcttccctgttgaattgaagcaaatcagattttctgtggggaccctcaaatgcaactgaagaaatagattgttgcattcattcctccccaccccccatttgtaggcagtaaacaaagtatgactgacagattgaacacctgcaaaactgctagcgtaatctcagcacatacgcagctaggaagtttgtcataaaatcaacttagaaatgagatgaggctgttcagtttgtcttaaaaaaatcagattaggtaaaagctgtcctaccaaagagtctagcaaaacaatatagtatttttttgcagaggcatg

SEQ ID NO: 35091 - DNA, 454 bp, Homo sapiens
  misc_feature (1)...(454): n = A,T,C or G
nattgaaatcgatggccactagccagngcggtggaattcgtaagactgctgtcatatttgactacatattaaaaacagtaaatgagcattttgttttaatttcttaaataccttgtctttcagcatacattttgtttcctttcttgcattagtgttcaaaaggctctacccattgtggaagaaattctgtgtgcagaattcagaggcacaaggctgatggcaagatagaaagttattttgcttctaaacccaccccgatgtggaaactgatactagctagagggagctgtagaaaacaaagatttcaggattgcacagtgtgtgggcaatgggatggagactttttcccctattcccagccacagtgcccaagcgttcaagtctcctggatcagacagatgggatattagctgctgctttaaatcctagtgctggaataagtcaaggtacttct

SEQ ID NO: 35092 - DNA, 454 bp, Homo sapiens
  misc_feature (1)...(454): n = A,T,C or G
ntttgatgatcgtaggcagtgcggnggaattcagggaggccacggcatgcgtaggatcaggctgcagctgtccagacagccttcagcttatgtgcttgtggccactccaggggctctgtggaaggccctgaaaagtcgactgatcagtctggagcaactctccttcttggtgttggatgaggcagacacactgctggatgaaagcttcctggaactggtggactacatcttagagaagagccacatagcagaaggcccagctgacttggaagaccccttcaatcccaaagctcagttagtgctggtaggagccacatttcccgaaggtgtaggccagttgctgaataaagtcgccagcccagatgctgtcaccaccatcaccagctccaagctccactgtatcatgcctcatgtgaaacagacatttctgagactgaagggagcagataaggtg

SEQ ID NO: 35093 - DNA, 456 bp, Homo sapiens
  misc_feature (1)...(456): n = A,T,C or G
attgaatccgtagagtcatcagccagngcggnggaattcctacatctgcgaacagctgttctccattatgaaactgagcaaaacaaaattctgcttccagttaaaggattcccagtgggattctgtactccacatcgcaacgtgagggagagaaaactcctggcagggccctatggtgggaaaggctggagtcttctagtcccaagggattgggagatgacaaaatgaatttttttcttttttgagatggagtcttgctctgtcgcccaggttggagtgcagtggcgtgatctcggcttactgcaacttccagctcctgggttcgaacgattctcctgcctcggcctcccgagcagctgggactacaggcgtgcgccaccatgcctggctaatttttgtattagtagagatgaggtttcaccatgttggccaggctggtctccaactcctgacctn

SEQ ID NO: 35094 - DNA, 463 bp, Homo sapiens
  misc_feature (1)...(463): n = A,T,C or G
catagagaccatagaccaccgtcgcggaantcgaanctcctgattgacgacgatgatgacttcagtacaatcagagatgacactggaaaagaaaagcagaaacaacgggccctggggagaaggaaaagccaagaagccctccatgagcagagcagctacatcctctccagtgcagagacgcctgcccggccccgagccccggaaacttctctctccatccacgtggggagcttcagataaccgcgccgctgcacggctctactcccgatgaactctccggctgatgccacaaacgtgggtttcctgggcatggggactggctgcctggcgcctccaatcccaaatcctctgcttcctttgagcacagggacggctcctctgaggcctggccagtgcatgtagtcacttagctctgcaacacgtggcagccacggaggctggtgcagctctggatgtcgcccac

SEQ ID NO: 35095 - DNA, 486 bp, Homo sapiens
  misc_feature (1)...(486): n = A,T,C or G
cccgcccccccccccnnccnatagaaaaccatagtagaccactagtccagtgcggaggaattcattgaaattacattattttaatgactctattagtgagggtcattcttcccatgtttcttgttagccatgaccctataagaaataaactgcactgcaaaatgataaacatgatatcaatcattacatgggaaggcactatataaagaataataccttacgttaaggccacataaatatttatcaggtgccttttctgcggaggactctgaagggatactaaactgcatttagctgcatgcaactgaaactacttttacctacattgtctcttataaacattataactactctttgagaaagtgtttactatggactgaattgtctccccatccccccaaattcatatattgaagccataaaccccaatatgactctattcctagacaggacttataagaggtaattaaggttaaatgaggtcat

SEQ ID NO: 35096 - DNA, 438 bp, Homo sapiens
  misc_feature (1)...(438): n = A,T,C or G
tggtttnnnnnaatcgatgtcattactccgtgcggtggaattcgaaagacagtcctggtgaatgggcttcaagtggtcacaaagagggtggctgtgaggtgaccccagacactgcagaacgaggtgcaccctctgcgttttggatgtccttggaatgtgggagcctagaaataaccctgtggatggaattggggcagcggctgctggagatctgtgcgccttgccttccttcagcaggaccgtctaggtgcgcagccacctatggatgcgtcccagccagccccgtcgctctcgtccatcctcagagacaaagaagagggcagggagtttgggcttggttttgaactttcctttcaatgtagcaaagcattcctagttaaccagagccttggaatctactgcctgctggccaggctttaaaatgaaaagtgttttaat

SEQ ID NO: 35097 - DNA, 422 bp, Homo sapiens
  misc_feature (1)...(422): n = A,T,C or G
attgccggtgccgccgccaccgctgtctgtgcgcccacctctgctgctaccatggggatcttagagaagatctcggagatcgagaaggagatcgctcggacacagaagaacaaggccactgagtatcatctgggcctgctgaaagctaagctcgccaagtatcgggcccagctcctggaaccgtccaaatcggcctcgtccaaaggagagggctttgatgtcatgaagtcgggtgatgcccgtgtggcgctgattggatttccctctgtgggtaagtccacattcttgagtctgatgacctccacggccagcgaggcagcgtcctatgagttcaccactctgacgtgtattcctggggtcattgaatacanaggtgccaacatccagctcctagaccttccctggatcatttgaggcgcagg

SEQ ID NO: 35098 - DNA, 391 bp, Homo sapiens
  misc_feature (1)...(391): n = A,T,C or G
gataaatattgtttgggaaaacctttgttcaggtcctgatgtatttcatactgtgattatgaatttttgaaagttcagagagctcttctaacacaaattatacactgtacaaattctgtgttgtttttctttcactgagagcttttttaaacatgatgttacaatttccttattcattattgcacagtggctcttctatggataagcattggtactgaagacagtacattagtcctggtgtttttagcccggaagactgggcaaagcgggataagcatgcattgctgtgaagcgcatcacagttttggagcagagtctgggtatagcatgtgtggcgggaggtaatgatcccaatgcataggttcttattctagttttttgagggtgcttn

SEQ ID NO: 35099 - DNA, 487 bp, Homo sapiens
  misc_feature (1)...(487): n = A,T,C or G
agggcngnnnnnnncgccncctggagacccctagtcagtgttgtggaatccttctaagtgccacaccagacatatagactctttactttaaaagagcatatatttaaggcattgaaatggatacagctatattcattctcaattgtcttaggctattatatggaaagatatgtgtcaattataggtaggtaggtaggtaggtagattttctggaaacacagaagtacttgacggagagttaggcctgtattctataaatctattaatggtagcaaagtgcataagacagggatttctttgagatgaaaggagtgctgaagaagagcattggaattaatatttggatgtggtattgtgaaattcaatgggtaaagtaaccctaatgtgggaataaaagtcaagggaaaggtcttgaataagtacacagaaaaataggctaaaaatattaaggggagggaaattggaatacagggagacagtgtgcaag

SEQ ID NO: 35100 - DNA, 503 bp, Homo sapiens
  misc_feature (1)...(503): n = A,T,C or G
agcncncnnnnnnnttttgttaacctactccgtgtggtggaattctcctcattgcagcttctgggtcattcttttctcatccttagacccttgtagattagaatctcctgctatcagattatatacccactgccactcatttctgctttcatgtactaactcccaggtttttacacctcgtttcttgatgggtttagcacctaggtggataactgtcactggattcatttgtataatactattgctttaattcttgagggtgttactataaccataaatgggcctttaaacattcttcactttcaggttattgaatttctgtcctcctaggaaacttgccttcaacactattctaaccgatcggtctcatggtcttcctacacaccttgctgttgccattaactgcaacccattcgtgtgtcaattgcattcattccatctctgagcacgactttgtatctttccagtttgctccctcatataccccaatcctaacaatcctt

SEQ ID NO: 35101 - DNA, 506 bp, Homo sapiens
  misc_feature (1)...(506): n = A,T,C or G
agtccntnnnnnnnttttgtcgacgatcactagtcagtgtggaggaattcccatcgtggagttccacatgacgactgaggcccaagccaccatccgcatggacaccagtgcaagtggccccacccgcctggtcctcagtgactgtgccaccagccatgggagcctgcgcatccaactgctgcataagctctccttcctggtgaacgccttagctaagcaggtcatgaacctcctagtgccatccctgcccaatctagtgaaaaaccagctgtgtcccgtgatcgaggcttccttcaatggcatgtatgcagacctcctgcagctggtgaaggtgcccatttccctcagcattgaccgtctggagtttgaccttctgtatcctgccatcaagggtgacaccattcagctctacctgggggccaagttgttggactcacagggaaaggtgaccaagtggttcaataactctgcagcttccctgacaatgcccaccctggacaacatct

SEQ ID NO: 35102 - DNA, 454 bp, Homo sapiens
  misc_feature (1)...(454): n = A,T,C or G
attgaaactgatgacatctagcccangcggtggaattcatgatgcccagcagcgcctgtgaggccatggtggggcacgagatggcctctgactcttcaaacacttcactgccattctcaaacatgggaaatccaatgaacaccacacagttagggaaatcactttttcagtggcaggtggagcaggaagaaagcaaattggcaaatatttcccaagaccagtttctttcaaaggatgcagatggtgacacgttccttcatattgctgttgcccaagggagaagggcactttcctatgttcttgcaagaaagatgaatgcacttcacatgctggatattaaagagcacaatggacagagtgcctttcaggtggcagtggctgccaatcagcatctcattgtgcaggatctggtgaacatcggggcacaggtgaacaccacagactgctggggaag

SEQ ID NO: 35103 - DNA, 451 bp, Homo sapiens
  misc_feature (1)...(451): n = A,T,C or G
ntcgagatcgtaggcagtgcggnggaattcggattcaaaacgtttgatatgtaagtatttatataagactaatgtaatttaaagctctgtattattgtgattaatcatacagaaattcaggaactgatcagaagtgagattcttttccacatctggttaatgtagtgagttgacaccctgtgggtggtaaagcattataaacatttcatcttgaaccatgatttatacacatctgtgttataagggaggcttgagtacatataccaatgaagagatattcagcatttgtctatttgataaggaattaaatgtcctagtgattataacgtgaaaccacagaccaatttgcaaatgatcttcaatgttaagcacttgctctaagattaaaattccttttctttataagggtaaagggtgtgtacgtatggcagtgatgtctatgttgagagan

SEQ ID NO: 35104 - DNA, 455 bp, Homo sapiens
  misc_feature (1)...(455): n = A,T,C or G
natcgagattcgtaggcacgtgcggnggaattcgcttgaaatttattttttaaaaaaagaaaaatttaaaaaatatataaataaaatagatcaaagccggtgatgcaagttgatattataaacaggcagttttagcacagaaagaaaatactgacctgtctgcattctggtacggtgggtgcaggtcccagctgggtatgacatgatacatttttaattattctcaccagcaagtaaaaggaaaatgaacagtcttttggaattgtctttgaaaaggatcaaagagtaggaaattcacatttgacctaacattacttgcctatagaagtatggcatttccaagcttttgtctgaggagcatctcagagaagtgagagtaaatctgagttagcttaaaaattggtagggaggaagaaaatctctgcaaataatgattttatgtttgttggccaagt

SEQ ID NO: 35105 - DNA, 457 bp, Homo sapiens
  misc_feature (1)...(457): n = A,T,C or G
atattgtaaaatacatatgtactaagaattttcaaaattggtttgttcagtgtggagtatattcagcagtatttttgacatttttctttagaaaaaggaagagctaaaggaattttataagttttgttacatgaaaggttgaaatattgagtggttgaaagtgaactgctgtttgcctgattggtaaaccaacacactacaattgatatcaaaaggtttctcctgtaatattttatccctggacttgtcaagtgaattctttgcatgttcaaaacggaaaccattgattagaactacattctttaccccttgttttaatttgaaccccaccatatggatttttttccttaagaaaatctccttttaggagatcatggtgtcacagnggttggttcttttgttttgttttttaacacttgtctcccctcatacacaaaagtacaatatgaagccttcn

SEQ ID NO: 35106 - DNA, 476 bp, Homo sapiens
  misc_feature (1)...(476): n = A,T,C or G
ggcaaggggnnnnnnntactgtagtcactagtccgtgtggtggaattcagacaggccacatcagtatgctattaagctgtctttagtccacaatttactaccatcacttcaacttttctttagaactgaaaacagtatatgactgaatgccaccttcttgaattatttggctagaggatggtattaaacagaagggcaatatctccaagtgagttcttatggaggaaaactgccccagagccatggtgtctccctgttcaagatggcagatggttcagggcagactgagaggtgcccctcaagtgtcctgcctctatggctttatctttgcatatgtggcactgtcagctcaatggcacgacagggctgctctgctgctcttcgatgtagaggcttgccaggggaaataggcacacagatgcagcctccttcctaaccctcaactgcaatctattttgtatcccttgagctctcaa

SEQ ID NO: 35107 - DNA, 486 bp, Homo sapiens
  misc_feature (1)...(486): n = A,T,C or G
agcgtnctnnnnatgatgtccctacttagtgtcgnggaattccganagctaccttgtgttgcagcaaagatctaccgaaatctctacagagaaggcagcggtattggggccattgactctaacctggactggtctcacaatttcaccaacatgttaggctatactgatcatcagttcactgagctcacgcgcctgtacctcaccatccacagtgaccatgagggtggcaatgtaagtgcccataccagccatttggtgggcagtgccctttccgacccttacctgtcctttgcagcagccatgaacgggctggcagggcctctccatggactggcaaatcaggaagtgcttgtctggctaacacagctgcagaaggaagttggcaaagatgtgtcagatgagaagttacgagactacatctggaacacactcaactcaggacgggttgttccaggctatggccatgcagtactaaggaagactgat

SEQ ID NO: 35108 - DNA, 437 bp, Homo sapiens
  misc_feature (1)...(437): n = A,T,C or G
agggtnnnnnaatgatgaccctactccgtgcggtggaattcattggcctctgcagaaggcagcatgcccgggctttggagtcagacctgcatacaaatccttgttttgccggtgtgaccttgccaagtcttctttcctgcaggacagaaggcggcagcagctctccctgaactggcactctggcttctcttgccccagggtctgtttctgctccttggacagcaggcgcatgtgggaactgtgccctcttcagccatgagcccctgttctgcgcacatctagcccatcttccagatggacagacagtctgtggtcgtcgccaaacccctgaatctggccctgcccgcagtcagagggatggcaatttgtaagctacagactattgcgaatcattcacttggagactgaactaagactactggcaccaggctccgtaa

SEQ ID NO: 35109 - DNA, 496 bp, Homo sapiens
  misc_feature (1)...(496): n = A,T,C or G
gccattcaaggggnacnnnnttcgagatccatgttgagtaccacgtagaccatgcatctctatttaatataaagttggatgcggaacccaaattacgtgtactacaatttaaagcagaggagtagaaagacagagctgggatgtttctgtcacatcagctccactttcagtgaaagcatcacttgggattaatatggggatgcatcattatgatgtgggtcaaggaattaagttagggaatggcacagcccaaagaaggaaaaggcagggagcgagggagaagactatattgtacacaccttatatttacgtatgagacgtttatagccgaaatgatcttttcaagttaaattttatgccttttatttcttaaacaaatgtatgattacatcaaggcttcaaaaatactcacatggctatgttttagccagtgatgctaaaggttgtattgcatatatacatatatatatatattttaatttgatagtattgtgca

SEQ ID NO: 35110 - DNA, 485 bp, Homo sapiens
  misc_feature (1)...(485): n = A,T,C or G
ggnncttgcnnttcgagcccctgctgagaccctangccangncgnggaattcgcgcctgcgcagctacgaccgcagcaggaaagcgccgccggccaggcccagctgtggccggacagggactggaagagaggacgcggtcgactgggttttaaaacatgaatcctacactcatccttgctgccttttgcctgggaattgcctcagctactctaacatttgatcacagtttagaggcacagtggaccaagtggaaggcgatgcacaacagattatacggcatgaatgaagaaggatggaggagagcagtgtgggagaagaacatgaagatgattgaactgcacaatcaggaatacagggaagggaaacacagcttcacaatggccatgaacgcctttggagacatgaccagtgaagaattcaggcaggtgatgaatggctttcaaaaccgtaagcccaggaaggggaaagtgttccaggaacctct

SEQ ID NO: 35111 - DNA, 473 bp, Homo sapiens
  misc_feature (1)...(473): n = A,T,C or G
natcgaagaccctagtcgcaggccntgaattcgnccngctgcacgcgtcgcgccaatcttcgctctgaggtgctgtctcaccggtgagacctggaagcgggctagtctcgagctgtgtcggacctgcagcccctggccttccgccaccatggagtacctcatcggtatccaaggccccgactatgttcttgtcgcctccgaccgggtggccgccagcaatattgtccagatgaaggacgatcatgacaagatgtttaagatgagtgaaaagatattactcctgtgtgttggagaggctggagacactgtacagtttgcagaatatattcagaaaaacgtgcaactttataagatgcgaaatggatatgaattgtctcccacggcagcatctaacttcacacgccgaaacctggctgactgtcttcggagtcggaccccatatcatgtgaacctcctcctggctggctatgatg

SEQ ID NO: 35112 - DNA, 474 bp, Homo sapiens
  misc_feature (1)...(474): n = A,T,C or G
ntcgagaccctgtagtagaccctagtccgcgtggtggaattccaccaaggcaccaagatgataccctgtgacttcctcatcccggtccagacccagcaccccatacggaagggtctgcatcacaagatcctcctggccaacttcttggcccagacagaggccctgatgaggggaaaatcgacggaggaggcccgaaaggagctccaggctgcgggcaagagtccagaggaccttgagaggctgctgccacataaggtctttgaaggaaatcgcccaaccaactctattgtgttcaccaagctcacaccattcatgcttggagccttggtcgccatgtatgagcacaagatcttcgttcagggcatcatctgggacatcaacagctttgaccagtggggagtggagctgggaaagcagctggctaagaaaataaagcctgagcttgatggcagtgctcaagtgacctctcacgac

SEQ ID NO: 35113 - DNA, 495 bp, Homo sapiens
  misc_feature (1)...(495): n = A,T,C or G
ntttgtcgacgatcactagtccagngnggnggaattcggtggatcacctgaggtcaggagttcgagaccagcctggccaacagggtgaaaccccgtctctactaaaagtacaaaaattanctgggcgtggtggcggacgcctgtaatctcagctacttgggaggctgaagcaggagaagtgctggaacctgggaggcggaggttgaagtgagccgagattgcgctattgcactccagctcgggcgacaactgcaagactccatctcaaaaaaataaaaataaaagaaaagaaagaaatatgtgcactacctaagttttgtctttagaaaaactatccacctataaaaaattaccttgacaaaaatagttccggtttgactaatcattttgtttctttaagtggtaagtgtatgcaaggtggatccttgatgagccaacattgcactgtggatacatatctatgtttacgcgctattagaacagaaggcgctgtag

SEQ ID NO: 35114 - DNA, 489 bp, Homo sapiens
  misc_feature (1)...(489): n = A,T,C or G
agtgantnnnnattgatgtcctactctcgtgtggtggaattcggcctgtgagattgagcgtggcagcggaggaggtcgccactttttatgggaggatgttagatcatgaatacacaacaaaggaggttttccggaagaacttcttcaatgactggcgaaaggaaatggcggtggaagagagggaagtcatcaagagcctggacaagtgtgacttcacggagatccacagatactttgtggacaaggccgcagcccggaaagtcctgagcagggaggagaagcagaagctaaaagaagaggcagaaaaacttcagcaagagttcggctactgtattttagatggtcaccaagaaaaaataggcaacttcaagattgagccgcctggcttgttccgtggccgtggcgaccatcccaagatggggatgctgaagagaaggatcacgccagaggatgtggttatcaactgcagcagggactcgaagatccccg

SEQ ID NO: 35115 - DNA, 447 bp, Homo sapiens
ataaacataggttatctccacatttaatttaaaatgacattgctttttaaaacagtttttaggtctgaatacacatttgtcaaaaaaagatataaaatggccaataagcatatgaaaagatgcttagggaattagtcattagggaaatacaaatcagaaccacaatgagacataatttcacatctaccaggatagcactagagtcaaaaaggcataataacaagtgctggcaaagagagaaattagaattctcaaaacgccactggtgggactgtgaaatgttacagcagtctggcaagccctcacaaagttaaacacttgagttaccctatgacccagcaatcccacttctaggtatacatatgtgagagaatgaaaacatacatccacacaaaagcttatgtatgcatattcatagcactattcataatagccaaaaaataaaaa

SEQ ID NO: 35116 - DNA, 475 bp, Homo sapiens
  misc_feature (1)...(475): n = A,T,C or G
attgtagcatcgtcaggggggaatcccacctcggctcccaagatcatctgctccttttgctgtctcaatgggcaccctttccagagcatgagtgggtactcactaaacatataatggtgattgagtgggtactcactaaacatataatggtaattccagctgtgagttttattggattattgaaacggatctaggaagtaggtaggtaggtattatcatgtcccccatttacaacgtgagaaacccaagctcggaaaggttaagcgacttgtccatattcacacacaaagctagggctggggaccaggtttacatacaaagctggngctggggacgagggtcacacacaaagctaggggctggggacagggctgttgcctttcaagccaaacctttctgctgaaccccacaccctgtcagggatgtagcatgagggaatatttcctatcacctgggcagagcttaaagaaccggg

SEQ ID NO: 35117 - DNA, 500 bp, Homo sapiens
  misc_feature (1)...(500): n = A,T,C or G
agagcttnnccnaggggncgggccnngttagaaaacccttcctcgaagaccactcaggaagtgtcgtggaattcgtcgaatctatgagcttcgaaataaggaacgcatctctgtagcagctgcctccaaactgcttgccaacatggtgtatcagtacaaaggcatggggctgtccatgggcaccatgatctgtggctgggataagagaggccctggcctctactacgtggacagtgaagggaaccggatttcaggggccaccttctctgtaggttctggctctgtgtatgcatatggggtcatggatcggggctattcctatgacctggaagtggagcaggcctatgatctggcccgtcgagccatctaccaagccacctacagagatgcctactcaggaggtgcagtcaacctctaccacgtgcgggaggatggctggatccgagtctccagtgacaatgtggctgatctacatgagaagtatagtggctctaccccct

SEQ ID NO: 35118 - DNA, 446 bp, Homo sapiens
  misc_feature (1)...(446): n = A,T,C or G
agggggnnnntttgctcgacgtccctagtccgtgcggtggaattcaaagagaatgtgaagcagatcaaggaaacttctgttgagctaggctcagggtgagctttggctggggttgcccttgtgtagtacagggaagtctgacacagcctctccagcctataaacagccggggggctgtggcacaggttggggcaatgttcccttgttggtgggcccccaagctggcaaggcctcttggctgaaggccagggactctgcccctggagtcctggagttaagggatgaaggcaaggctgcaggtctggcccaggggaattaaaagccagccactccagtggtatcagtctctttattggatgtgagggccaaaagggactgtaactcctgtctcangaatggggatagatgggaggttcttgaagccccangcgaagctggtacctctg

SEQ ID NO: 35119 - DNA, 447 bp, Homo sapiens
  misc_feature (1)...(447): n = A,T,C or G
agggggtnnntttgtatgcgatcactagtccgtgtggtggaattccagatcaccattaaaaagaatattagaatccagcatgaagataatggctaataaaaatgaggtacatactttataaaaccattaatcagatttgaatgaggaatgcttcccacatccttgaaagaaaaactgtggcttacgttttgaagtattctgagaatgaagtattaagatccaatttctataagcaagatcagacttgttaagtatgccgcaagtaagagctaattcattcattccatgtgtgccactaaataaagagattgagcaagtgccactgtgtggaacatttttcttttttttaatattggactttccaattttgaaattatggataaagtcctaaattttctatagtggcttcttttctgtctgcatattttgttaaaattgtggatctaa

SEQ ID NO: 35120 - DNA, 454 bp, Homo sapiens
  misc_feature (1)...(454): n = A,T,C or G
cggggggnnnnnnnaatcgaatcgcgtatcactagtccgtgcggtggaattccatgaggccagaagatcaagaccatcctggctaacacggtgaaactccgtctctactaaaaaaaataaataaataaaaagccacaaaaaattggccgggcatggtggtgggcgcctgtggtcccggctactcgggaggctgaggcaggagaaaggcatgaaccagggaggcagagcgtgcagtgggcctagatcacaccactgcactccagcctggcggacagagcgagactccggtctcaaaaaaaaaaaaaaaaaaaaagnggtttctcttttttttaaggaaacgggggaacccccccaatttctttcccaaggggccttttaaaaaaaaacaaaatttttttattttaaccccccccccttttatatgtatgattgggaccctccacaagggggtgtg

SEQ ID NO: 35121 - DNA, 439 bp, Homo sapiens
  misc_feature (1)...(439): n = A,T,C or G
gggggtnncctgattgcgtcttagtgcggggaattccaggagtcgtctactttgctgacgatgacaacacctacagccgggagctgtttgaggagatgcgctggacccgtggtgtctcaatgtggcctgtggggctggtgggcggcctgcgattcgagggccctcaggtacaggacggccgggtagtgggcttccacacagcatgggagcccagcaggcccttccctgtggatatggctggatttgccgtggccctgcccttgctgttagataagcccaatgcccaatttgattccaccgctccccggggccacctggagagcagtcttctgagccaccttgtggatcccaaggacctggagccacgggctgccaactgcactcgggtactggtgtggcatactcggacagagaagcccaagatgaagcaggaggagca

SEQ ID NO: 35122 - DNA, 491 bp, Homo sapiens
  misc_feature (1)...(491): n = A,T,C or G
nttcgtgatccctcgttcagngaggnggaattcggcccttgagagtatccactttgggaaatacacacaccagagtgatgtctggagctatggtgtgacagtttgggagttgatgaccttcggggcagagccctatgcagggctacgattggctgaagtaccagacctgctagagaagggggagcggttggcacagccccagatctgcacaattgatgtctacatggtgatggtcaagtgttggatgattgatgagaacattcgcccaacctttaaagaactagccaatgagttcaccaggatggcccgagacccaccacggtatctggtcataaagagagagagtgggcctggaatagcccctgggccagagccccatggtctgacaaacaagaagctagaggaagtagagctggagccagaactagacctagacctagacttggaagcagaggaggacaacctggcaaccaccacactgggctccgcct

SEQ ID NO: 35123 - DNA, 475 bp, Homo sapiens
  misc_feature (1)...(475): n = A,T,C or G
gtggacgggcnccccaactgagaccctgataaccgtcgcggaanncgctgagntgggcctggtctcaaaatcccgactagagcctgctttgtttgctccttgtatgtgttattccagctctcttttatctgccccttccccaggctttggaggagaagatacggaccacggagacacaggtgcttgtggcatctgcacagaagaagctgctagaggaaagactaaagcttgtctcagaactgtgggatgctgggatcaaggctgagctgctgtacaagaagaacccaaagctactgaaccagttacagtactgtgaggaggcaggcatcccactggtggctatcatcggcgagcaggaactcaaggatggggtcatcaagctccgttcagtgacgagcagggaagaggtggatgtccgaagagaagaccttgtggaggaaatcaaaaggagaacaggccagcccctctgcatctg

SEQ ID NO: 35124 - DNA, 485 bp, Homo sapiens
  misc_feature (1)...(485): n = A,T,C or G
tgggnntnnnntttgtcgacgtcactatccagtgtggtggaattcgctggtgggaattctgctgtcccagatcctagtgaatcagatcaaagatcagatcaagctacagctctacaaccagcagcaccgggctgacccatggtactgagaatccatcctgcacctcctcaccatggaaactggcaagcctcataaacgaacagcagtgggtgctgaaagcagcaccaaatggagatttggattccagccccccagtgacagcccagtgggaagaagcaaactccagatgggcagaaggcagggtgcacaggtggctccagtctcaggaggatgcgcctcctctcccccatcccagtcctcagcattgtgccagagtgatacccttaagtgtttgggtttatgttttcagttttgtttgggaaacagcagttgcacagagaagttggggtactgctgctgccttttcaccgaggcactgccaccac

SEQ ID NO: 35125 - DNA, 456 bp, Homo sapiens
ccggctctgctggccggtctaaagcggcagccgccggggcgcaatgcgagcggctggcgtaggcttggtggactgtcactgccacctctccgccccggactttgaccgcgatttggatgatgtgttggagaaagccaagaaggccaatgttgtggcccttgtggcagttgccgaacattcaggagaatttgaaaagattatgcaactttcagaaaggtataatgggtttgtcctgccatgcttgggtgttcatccagttcaaggacttccaccagaagaccaaagaagtgtcacactaaaggatttggatgtagctttgcccattattgagaattataaggatcggttgttggcaattggagaggttggactagatttctcccccagatttgctggcactggtgaacagaaggaagagcaaagacaagtcctaatcagacagatccagttagccaa

SEQ ID NO: 35126 - DNA, 475 bp, Homo sapiens
  misc_feature (1)...(475): n = A,T,C or G
agcagttcccccnttagaaaccacatgagatcctcggacaagcggnggaattcaaacaagccactgacaatgcaaaggaggaagtgaggcgaaccctggggctgctggattcttacttgaagacgacgacttttctggtgggcgaacgattgacattggctgacatcacacttgtctgcaccctgttgtggctctataagcaagatctagagccttctttccgccaggcctttcccaataccaaccgctggttcctcacctgcattaaccagccccagatccgggctgtcttgtgcgaagcgaaactgtgtgagaagatggcccagtttgatgctaaaaagattgcacagacccatcctaacatggacacaccacggaaagagaacggctcacgggaagagaagcataagccccacgctgagcggaacgaggagaataaggcggctgcccctgctcctgaagaggagatagaagn

SEQ ID NO: 35127 - DNA, 482 bp, Homo sapiens
  misc_feature (1)...(482): n = A,T,C or G
aggggctnnnatcgatgtcctacttagtgtggtggaattcagtactttaagaagcagaagcggctcatcccggagaggacagtatggaagtactttgtgcagctgtgcagcgccgtggagcacatgcattcacgccgggtgatgcaccgagacatcaagcctgccaacgtgttcatcacagccacgggcgtcgtgaagctcggtgaccttggtctgggccgcttcttcagctctgagaccaccgcagcccactccctagtggggacgccctactacatgtcaccggagaggatccatgagaacggctacaacttcaagtccgacatctggtccttgggctgtctgctgtacgagatggcagccctccagagccccttctatggagataagatgaatctcttctccctgtgccagaagatcgagcagtgtgactaccccccactccccggggagcactactccgagaagttacgagaactggg

SEQ ID NO: 35128 - DNA, 464 bp, Homo sapiens
cttcgatgacgattcgtccagtgcggcggaattcgtctcactctgttgcacagcctggagtgcagtggcacgatctcggcttactgcaacctctgtctcctgggctcaagcaattctcctgcctcagccccctgagtagctaggattacaggcatgcaacaccatgcctggctaatttttgtatttttagtagagacagggtttcaccatgttagccagtctgtgtccaactcctgacctcaggtgatccacccgcctcggcctcccaaagtgctgggattacaggggtgagccaccacacccagccttgggggccattttaaatggtgaaattgtcaacagaaagcacaacaatgtgaaaaatatggcactaaatagaccacaaaaaggacacttgtttatagtagagagctgaaacaagaaagcagcgcttcactttgctccaccttagctgggagcaagtg

SEQ ID NO: 35129 - DNA, 458 bp, Homo sapiens
  misc_feature (1)...(458): n = A,T,C or G
nttcgatgtccctcagtccatgcggtggaattccttcccgtccaccatccccatcgtgggcattgttgctggcctggctgtcctagcagttgtggtcatcggagctgtggtcgctactgtgatgtgtaggaggaagagctcaggtagggaaggggtgaggggtggggtctgggttttcttgtcccactgggggtttcaagccccaggtagaagtgttccctgcctcattactgggaagcagcatccacacaggggctaacgcagcctgggaccctgtgtgccagcacttactcttttgtgcagcacatgtgacaatgaaggacggatgtatcaccttgatggttgtggtgatggggtcctgatttcagcattcatgagtcaagggaaggtccctgctaaggacagaccttacgagggcagttggtccaagacccacacttgctttcctcgngtttcct

SEQ ID NO: 35130 - DNA, 486 bp, Homo sapiens
  misc_feature (1)...(486): n = A,T,C or G
nttatcgagaccatatcagnngggggaattccatgggcagctgctgaccagtgtgtaccagcccactgagatggccctgatgcacaaagttccgtccgaaggagcttacgacatcatcctccgacgggccaccgccaacagccaggtgatgggcagtgccaactcgaccctgcgggctgaagacatgtactcggcccagagccaccaggcggccacaccgccgaaagacggcaagaactctcaggtctttagaaacccctacgtgtgggactgagtcagcggtggcgaggagaggcgggcggatttggggagggccctgaggacctggccccgggcaagggactctccaggctcctcctccccctggcaggcccagcaacatgtgccccagatctggaagggcctccctctctgccagtgtttggggtggggcaatggtgccccacccactcctcattgtttgtggagtcgaggagccaaccccan

SEQ ID NO: 35131 - DNA, 492 bp, Homo sapiens
  misc_feature (1)...(492): n = A,T,C or G
nttgatcgacatcactaggccangnggaggaattctgcgtcatctcctatcggactggcgccgaggcggcggtacgcaaggctggagccgcagcgggagcccccgatgatactctccaagctggaaggaagaagtcaaggattaatgagacctggactggagaggagcctttttcaaaaaacaacaatgaccagagaaaatgtagcccacaatgctctgagacaagagggccttgggaaggggaatgatgatacctggaaatggggaaccagctttcaaggaagtacctcctctgtttgggagacctctcacctacactttagacaattacgtgaccatgagacatatggaccccaggaagccctgagccggctcaaggaactctgtcgccggtggctgagaccagaagcacgcaccaaggcacaaaacctggagctgctggcgctggagcactttctgagcatactgcctggggagattctgacctgggtn

SEQ ID NO: 35132 - DNA, 479 bp, Homo sapiens
  misc_feature (1)...(479): n = A,T,C or G
aggncagggcgcccgccatagagnccatgatgatcatagcccangtggnggaattcgtggcgtcttcctgtctcaacgatacctattttctagtgctgagatcctgagacaatgaacgctagccctaattaaaccagatgcaatatcaaaggctggagaaataattgaaataataaacaaagctggatttactataaccaaactcaaaatgatgatgctttcaaggaaagaagcattggattttcatgtagatcaccagtcaagaccctttttcaatgagctgatccagtttattacaactggtcctattattgccatggagattttaagagatgatgctatatgtgaatggaaaagactgctgggacctgcaaactctggagtggcacgcacagatgcttctgaaagcattagagccctctttggaacagatggcataagaaatgcagcgcatggccctgattcttttgcttctgcgg

SEQ ID NO: 35133 - DNA, 443 bp, Homo sapiens
atggacccaatgtacaaatcccttgaacctttgatgacttggaacaccacctctgccctatttcatcaattgccataatgaaataaaatgctccaaatggaatctgttttggcacaaaacatgaaggaaactaactagcaactgatattatgggtccattgattcaataatactttattgccttacttatgtaaaattgatatcacttcctctttcacctcatttttaattgcagattgaggaacagttgactttggaaaagttgcatgagtggactaaacctgagaatctcgatttcattgaagttaatgtcagcttgcccaggttcaaactggaagagagttacactctcaactccgacctcgcccgcctaggtgtgcaggatctctttaacagtagcaaggctgatctgtctggcatgtcaggagccagagatatttttt

SEQ ID NO: 35134 - DNA, 385 bp, Homo sapiens
ccggctggtgccccatgggcgcctctgagatgcccctccccaccccatcagtggcgctgtctcacctgcaggctgcttctcacaggtggtcccccctcactcctcctgcagccccagttcctggctgttcattcttattgggacccgtcaccctcctggaggcggtcccagccgagcccccttaagacagcaccaggctggctccacttggcccccgctggttcagggaagtgctgctgcagccgtttagtttgacaaaggaggcagcgaggccgtctcattggtagccctctcctggcttgcccagccaccacctcacctcgattcctcccaggcctgggtccagcaccagcctaagaagagggtgccccatgctgtctagctc

SEQ ID NO: 35135 - DNA, 392 bp, Homo sapiens
gagagatttactttcttagaaattaataggggaaatggcacttaatagaggtttaatggaatgaagtactttcaacccattgatgagagtcatggaagtttagagtggcaagacccagaggtcattaggtccagctttctattattgtgtcacagggacccctgctaccacagctttcacccatgggcatggtcaggtagcctctggtggctatgcatttattactcaaaagttgggcaactctaataacgagagagtttttcctcatatcagctgaagtctgcctgtggattctccttgtagtccagatctactatctgcaactctttaacggcacttgagatatgtgcagtgggtgggctccccctcagtcttactttgagctgctgtac

SEQ ID NO: 35136 - DNA, 440 bp, Homo sapiens
  misc_feature (1)...(440): n = A,T,C or G
gcggtnnnnnnaatgatgaccactacttagtgtggtggaattccggagtcatcctcggctccctgctgggcgggaccctggtctccgcgtacgggattcagtgcccggccatcctggctgccctggccaccctcctgggagctgtcctcagcttcacctgcatccccgccagcaccaaaggggccaaaactgacgcccaggctccactgccaggcggcccccgggccagtgtgttcgacctgaaggccatcgcctccctgctgcggctgccagacgtcccgaggatcttcctggtgaaggtggcctccaactgccccacagggctcttcatggtcatgttctccatcatctccatggacttcttccagctggaggccgcccaagctggctacctcatgtccttcttcgggctcctccagatggtgacccacggcctggtc

SEQ ID NO: 35137 - DNA, 442 bp, Homo sapiens
  misc_feature (1)...(442): n = A,T,C or G
aggggggnnnnnntttgattgtacgtccctagtccgtgcggtggaattcccattataagagttcttacagcaagaaagactgtttaaaaaaaataaaaagactcatgttaccttgagaagaattctggatgcccaggctggtgaagaagggattgacaatggaccatcttcctaggaactcccaagtaaactatttcaggacatgtatctgctgaaatgtattttattttcaaggtggaggggaaaatcgtctgtttcctaaatcctgtttaggatctgatagtctatgcctttgtctccgagtactgcagaactgacattttgacggtctaccagcgtggcggctggtgttggtcagatgcacctgtgtgcactgggggagggatggtttgggcaggtgcagatccaagggctgtggtaaacgggagagcttgtgtttttn

SEQ ID NO: 35138 - DNA, 424 bp, Homo sapiens
ctatttctaaaattttgtcatttgatatatctttttgtaaacatataattatacacacatatttctctaccacttatactttttcaaagtgctttcacatccttatagcaattctgcaaggtagccagggaaggctttcctatttcaggtcagaaaacagatttagaaatattaaatgacttaatgaaggtcacatgtttagcagtagaactagaactgggacccaagtctgatgttcagtcctagaccttttctacttgcccggtctgcctcttcacaagggaagacttgggttttagaatccagagaccttagaaggagcaaattggagaaggtgaggacatgatggcctttactaccggaagcaaaaagtgaatgtccagaggtgaagggacagagaagtaacaggacccatcagcatttc

SEQ ID NO: 35139 - DNA, 459 bp, Homo sapiens
cagaaattaatacgcaagctgtttctaaggcgctgccactggggagggtggctgttgccgcctgcccgggcatcctgctctggcaagcacagcctgagccattcctgcaggggtcccagggtgcagagacctccccacccccggttctgggctgggaccctggctccagggccatgtccagggctctggtgtttgcctgggttggtgcaggttgatgtgctggctgcaggcaggtgtgaccatctctcgtgcctgccacctctttgcccccaggcttttttgctgtgagggagccaccagggggtgatttaaataggtttatttcttcatttacaagaggaatatatttggcttctctcttaagactctgagattcacaatcagcagctctaaaaaataaaaggacagtttggcttccggaaggaagaggaggcaaaaaaaaaaaaaaaaaaaaagcgg

SEQ ID NO: 35140 - DNA, 424 bp, Homo sapiens
atgagacaggcgctttacgaggctcctgcttaccatcttattttggaagggattctgatcctctggataatcagacttcttttctctaagacttacaaattacaagaacgatctgatcttacagtcaaggaaaaagaagaactgattgaagagtggcaaccagaacctcttgttgctcctgtcccaaaagaccatcctgctctcaactacaacatcgtttcaggccctccaagccacaaaactgtggtgaatggaaaagaatgtataaacttcgcctcatttaattttcttggattgttggataaccctacggttaaggcagcagctttagcatctctaaagaagtatggcgtggggacttgtggacccagaggattttatggcacatttgaatgaagatgaaggatcattgatttccttgtgt

SEQ ID NO: 35141 - DNA, 443 bp, Homo sapiens
  misc_feature (1)...(443): n = A,T,C or G
ggggggnnnnntttgatagacgtcactagtccgtgcggtggaattcgcttttagggttggggggtggtttgctatctctttagctagcagaatagtgtgcctttgatcctcacacatcctgtattatggacacagtagccatgcttcacggggaggtcagagctggctaccagcagtcttgccctttactgagcttagtgtcatctttggatgctgtcatatgctgctttgagtgaaccagagaaacagccatttgcagcatgagaaagccccaaaagctctgggatttacctccactttagtaataatgaatattttttagcattagaatgtgttatgtcatttgaattaattttgactacactttggcttgggagaggaattattttaaatagacattggtactttttgaacttgatagctaaagattctaaaatgcatgt

SEQ ID NO: 35142 - DNA, 422 bp, Homo sapiens
  misc_feature (1)...(422): n = A,T,C or G
ggctatgaaccctgtgtaaataaaggaatgtgtgttacctaccacagtggcacaggatactgcaaatgtccagaaggcttcttgggggaatattgtcaacatcgagacccctgtgagaagaaccgctgccagaatggtgggacttgtgtggcccaggccatgctggggaaagccacgtgccggtgtgcctcagggtttacaggagaggactgccagtactcgacacctcatccatgctttgtgtctcgaccttgcctgaatggcggcacatgccatatgctcagccgggatacctatgagtgcacctgtcaagtcgggtttacaggtaaggagtgccaatggaccgatgcctgcctgtctcatctctgtgcaaatggaagtacctgtaccactgtggccaaccagttctcctgcaaatgccn

SEQ ID NO: 35143 - DNA, 424 bp, Homo sapiens
ctctattgtgcctaattttattttgcctttataatgaaatatttcaatgttataatcataaacattgattttattgtgatagaaatttgtggaaacacatattaaagaagagtctttgtggataaagcaggatatcagttaacccacagtaaaaatgtcccatcatagctgttcttttcctttattctttaggtgttggtgtctgtccagtcccttatattagtagctgagccttattttaatgaaccgggatatgaacggtctagaggcactcccagtggcacacagagttctcgagaatatgatggaaacattcgacaagcaacagttaagtgggcaatgctagaacaaatcagaaacccttcaccatgttttaaagaggtatgttcaataaaattagtgaaatactttgttaaagacattt

SEQ ID NO: 35144 - DNA, 420 bp, Homo sapiens
atctcagtaatgtgctggtcgcataaatgtcatgttttaataggaaaagttacttgtaaatctttagacctttgttgtcacttaggctggggagtcactaccctatttggcatcttactagttggggggaccttttccgtgtacagtgatgggacttttgtgacctttactctcactatgcaatagagggtttcatgtagttaatctgacatgtcaaaattgggaagactgtaacctttttttttttttttttaaaatttttttttttggggcccctcaatactaaccaaaggttatttggggggaaatttttattacttacttgaatgagtttgaatttaggggcagggaaaaaaaaaaaacctcaattttttgttttaaaaaaaaaaaccttgcaaaggccataagtttttttaaaaa

SEQ ID NO: 35145 - DNA, 443 bp, Homo sapiens
  misc_feature (1)...(443): n = A,T,C or G
cgggggtnnnnnttgatcgacgtccttagtccgtgcggtggaattcgtttctggacaaatactgaactctgccatcgtacttcagagcagccagtaggcaaaaaaagtacagtggtgtacacaaaaagaagcagttggactcgggaagctgaggcaggagaatcacttgaaccggggaggcagaggttgcagttaagccgagatcatgctactgcactctagcctgagcgacagagtgagactctgtctcagaaaaaaagaggcagctgggcagatttggcctgcagggtatagttggctgacctcaatctagaagatagagttgtttcttagaactttgtaatattttggttagaaatatttcagttaactccagttttttcctagctattcggtcagcagaaaaagtttgcttaaaacaaagggggtagtcctcttataac

SEQ ID NO: 35146 - DNA, 491 bp, Homo sapiens
  misc_feature (1)...(491): n = A,T,C or G
agggcctnnnttcgatctcgatcactagtcagtgtggtggaattccagaagttcgttgtcatagtgctcaccttgggaaaaggattaggtgggcacataagattccgatcagaccccaaccatgctgcatgtgtaaagaaggattgaaaataaaattgcactttttaggtacaaaatcataaaagctgtttcactagaaaaggcagaaagcagtgtattaaggtgttgaattacgccagaagacctgaaatgccttgtacctacaacaatgcttaggcttttctaagcctcttgccacttttaaaattatccttcaggcataaatatttttgacagcagaatagaagaatgattcatgagaacctgaaccagatgaacagctactagttattttatcaaatacagatgacatttaaaaattcttaactacaagagattagaaatataaaccttgcctggctcttgccaggagataacaaaatgggttgctg

SEQ ID NO: 35147 - DNA, 463 bp, Homo sapiens
cttcgatgatcattcgtccagtgcggtggaattctgagaatgtaattcggagcctattttgtttatacaagcttccagaattatgttctcagagggatgaaaaggtgtaatttagcatatagggcactaaattatgagctaagacacattttctcctgactgaccatgggtccaatcagttttgtcttcgagtccttttccttgtaaagtagaaactagaatttgaaatttacatattaaataatgggtaacattcattaatgtatgactctattaagaaagacactgtgaatccagggaggattctcataattctgtaaactgtatgacaagctgcggaatgaaatctgacttttgaaaattgaaagacatccagtggtcttatcacaaagcctgcttttgctcagaacttaactattgccatggaatttgtaagcagatatgctaatccatatggactctg

SEQ ID NO: 35148 - DNA, 448 bp, Homo sapiens
  misc_feature (1)...(448): n = A,T,C or G
agggttnnnnnncctcgatatcactactctagtgcggtggaattcgaagcaagtagccatagtacacacacaacacgctatcagcttgggtaaggacagtgggatttatgtgaacatcaggcaaagccatgagatcaaaccatcccaagcctttcaccaatgaggtacaaccacctgggggctagctaatcttgaatgttttcctgagacaggagcgtatgtgaaaacatcaaacactgcacatgacaggatgggtcctctcatacagatgggatggggttagaaagccagagccagtttttccatctggcgtttcctgtgtcctccaggtttatatgggaatcgaaacagtttgttaatctgattgggagagttccatgggcagatttcccttcctgaaggccaaaacggagaactgctctctttaattatttcaagagtcaagacc

SEQ ID NO: 35149 - DNA, 453 bp, Homo sapiens
  misc_feature (1)...(453): n = A,T,C or G
natcgagattcgtaggccgtgcggnggaattcctcgtttcccaccaagactcagactttttgagccaaaaaaaagccacattcttacactgtccagcttgtaatggttaatgtaaaacttaccagatgaaccttgtgtttcagcttttttcttttccccttccccttgcttcagaggcctgatggcgtcggactattccgaagaagtggccacctccgaaaaattccccttctagaacatgtagacacttgagaaatgtttctgtttgaagaaaatagagggagaaacagaagtcttaagtctgtggcacactgtgtcttcagacagtttgaaggaatgaaaacctagagattttaaatcatgaattgaacatgtaaaattccagtaaaatgtaaaaacggaatatgcatcgctcttaaccttgagcatagtgacttagagacactgtgtatn

SEQ ID NO: 35150 - DNA, 508 bp, Homo sapiens
  misc_feature (1)...(508): n = A,T,C or G
agggggttnnnnnnaatcgttctacatccctagtgagcgtggaggaattcgtacagagtttatttttaacaaatgtcatagctatgtcaccttactacagaatccagcagtcagaaaataacacaaaaaatgccgaggtttggcgtagctggtagctggggacagtgtcttcgtttgattactgccagttatttccagcatgctaaatccctacccacgttccagcctctaggtgagtcagtgcgtcactctgtctcccgtccaattaattatttctcatcactccctcaatccaagtaacaaaccttgaaacacgaacatagacaccaggcttattggggcgtgcacagccaagaccccaagaagtgactccttgtaaaatgtatttgtccttctcaaagcaaaccagaggccctccactgtcaccctaaatagaggtagggaaaaattcatgtgagggttaggctgccagccttttattgtggcatccatctattgtccatatgta

SEQ ID NO: 35151 - DNA, 443 bp, Homo sapiens
  misc_feature (1)...(443): n = A,T,C or G
gggtnnnnnncctgatgcgttcattagtccgtgcggtggaattcgtctggttaacacacgaagagatggaaacgctcgcagccacgccgcaaacggttagtcacgccccacagcctgcactcctcccagcgcgttttccacttaagaccgtctgggttctttgcctttttgttgaaaacaaaatgttgttttccattcagtcgttccagataagtatttcctttagttattagttgaaatgtgtaagtagaatttgtattttattttagattttttccaggaacttcaagttggtagactctgtcttttagaatagctttaatctagctctccttttggagagatctcagttgagcctccatgtgactgactgtgtggccctttctccttccatgaatatgcttggcacggagagagtctgctccttgcatgagaagttgaaa

SEQ ID NO: 35152 - DNA, 438 bp, Homo sapiens
  misc_feature (1)...(438): n = A,T,C or G
ggggggnnnnnnaatcgatagccctacatcgtgcggtggaattcggagttgctctaggtcgtaaccagcctttgaaaaaggagaaaccaaaaaggaaaagcgattatcctatgacagatggacaactacgcagcatgaaggatgaattttgggatacagcaccagcttttgaaggccggaaagagatttgggatgccttgaaggctgctgcacatgcttttgagagcaatgatcatgaactggcacaagcaatcattgatggtgcacacataacattaccacatggtgcacttacagagagctacgatgaactggggaacagatatcagcttccagtgtattgcttggcaccgccaatcaacatgatagaggaaaagagcgacatanagactctggatattcctgagccaccacccaattctggatatgaatgtcagc

SEQ ID NO: 35153 - DNA, 459 bp, Homo sapiens
  misc_feature (1)...(459): n = A,T,C or G
nattgaagaactgagaaccactagccagggcggtggaattcgagaaaggctggtcacagtggctcacatctctaattccagcactttgggaggccaaggcaagaggatcacttgagccgaggatttcaagaccagcctttgcaacatggcaaaaccccatctctacaaaaaatttgtttaaaattagctggacgtggtggcgcatacctgtggtcccagctactcaggagactgaggcaggaggctccagtgagctgtttgagccactgcacgccagcctgggtgacagagccagaccctgtcttcaaaaaaataaaaaattaaagtggcgtgaggtgaattgcatcagaccccacatatgaataaatggatggttggcaaagtgttatatataataagtacaattccttaggtgtccttaggtgtactactaaagtgggtttgtgatagcccatatat

SEQ ID NO: 35154 - DNA, 460 bp, Homo sapiens
  misc_feature (1)...(460): n = A,T,C or G
ntttatagtacgaccattagtccagtgcggtggaattcccagcattgcagcagctccaccatggcctgggctcctctgctcctcaccctcctcagtctcctcacagggtccctctcccagcctgaactgactcaaccatcttctgcatcagcctccctgggagcctcggtcacactcatttgcaccctaaataccgactactacagtacttataaagtggactggttccaacagagaccaggaaagggcccccgctttgtgatgcgagtgggcactggtggagttgcgggatccaagggggacgacatcccagatcgcttctcagtctggggctcaggcctgaatcgctacctgaccatcaacaacatccaggaggaagatgaggccgactaccactgtgggacagaccatggagatgagaccaacttcgttgtggtattcggcggagggaccagactga

SEQ ID NO: 35155 - DNA, 425 bp, Homo sapiens
  misc_feature (1)...(425): n = A,T,C or G
gtgtaaaaactcaagagctcctgcacttaggggtttacttcactaatcatctaacctcatttattatgcttaaggctttttctcagctgacctgactttgctttaggtcattcttttttatgccagcactgtttgaaagtgcatgtcaagcggctagctccacatttggtcttcgaaagggaaacgcatgcagttaaaacgtaatgtacatgatggaattgggaggatcatagtctcagtttccccccccctttctcccatctaggagacctccatggactgcagcaaaattaaaaataaagcacagacaacagaattattcttcactgagagagtttaatatgcgtttctaacaccatctatacttgctttgttgttcttgaggtcatcaacacacattctggttattccagagctagaagctn

SEQ ID NO: 35156 - DNA, 488 bp, Homo sapiens
  misc_feature (1)...(488): n = A,T,C or G
tggtcctnnaatcgtctgcctactctagtgtggtggaattccatgtgaagaaggatgtgtttgcttccccttccaccatgattgtaagtttcctgaggcctccccagacatgctgaactgttgaaagcctccacaatcaagcttttattaaagaacgagtactaccattgtgaccacagaagatagaattcgacaccaagagcgtgctggcccttctcaaagtgtcccatgaaaaagttattccacacctcctccctgaccttgtcgtgcagacgcttccaggatgaactccaactcgccgagccaccgcagctcctcagctgactaaaagagttaatgatcctccaggttaaaactcctccttgagcacacaccttctctcaacaaatgacaatacttggcaaactgaactcctcccacgagtcgccctctgctaggaggaattgctggctgctccctgcttattgcattctctcagagcagctgtc

SEQ ID NO: 35157 - DNA, 457 bp, Homo sapiens
ctacatgtatatatgtatatagatagatatatacataggtatctgtatatatgcatatacatgcctatctatctttatctacatgtattacatagatagggtaattactgataaatcctttggtcttctttgtaaatctctgggctaaagacccctccagtattatacgtgttctggtctagattgctcactcaccggttctcctcactatctagagaagatccacttagcaggcctccccttaaagaagggcaccttaactggactcactcctcccatagtagactgcacagtacacaagcagaagaggagagctcagtaataaagtcaccataaaggataatttttaaatgaataaagacatcagaaaatccagtattggctagcacatatggctatcagcaagctcaccctacaaaaaaatagtgagaaaacagttcgaatattggccgtttgg

SEQ ID NO: 35158 - DNA, 490 bp, Homo sapiens
  misc_feature (1)...(490): n = A,T,C or G
aggggnncnnnncctcgatgttcctactctagtgtggtggaattcccagaaaggacaggagacgtccaccaatcccattgcttccatttttgcctggaccagagggttagcccacagagcaaagcttgataacaataaagagcttgccttctttgcaaatgctttggaagaagtctctattgagacaattgaggctggcttcatgaccaaggacttggctgcttgcattaaaggtttacccaatgtgcaacgttctgactacttgaatacatttgagttcatggataaacttggagaaaacttgaagatcaaactagctcaggccaaactttaagttcatacctgagctaagaaggataattgtcttttggtaactaggtctacaggtttacatttttctgtgttacactcaaggataaaggcaaaatcaattttgtaatttgtttagaagccagagtttatcttttctatagtttacagcctttttctt

SEQ ID NO: 35159 - DNA, 442 bp, Homo sapiens
cttcatcatcaagggagtgcgcaaaagcaatgcagcagaacgcagggggcctctgtaaggcacatggaggtgatggtgtttcttaaagagaagatcactgaagaaacttctgctttaatgactttacaaagctggcaatattacaatccttgacctcagtgaaagcagtcatcttcagcgttttccagccctatagccaccccaagtgtggttatgcctcctcgattgctccgtactctaacatctagctggcttccctgtctattgccttttcctgtatctattttcctctatttcctatcattttattatcaccatgcaatgcctctggaataaaacatacaggagtctgtctctgctatggaatgccccatggggcatctcttggtacttattgtttaaggtttcctcaaactgtgatttttctgaacacaataaacta

SEQ ID NO: 35160 - DNA, 486 bp, Homo sapiens
  misc_feature (1)...(486): n = A,T,C or G
tggggctnnnaatcgatgtcctactcagtgtggtggaattcgtgggctgcttangaagagaaggtcagagttcgcgggggcagaggcattcttgccgctggcccagtcactatgtagtggaggggcagacaccctcccgcaaattctggaaggttcttagtctcgactagggcagtagccccaggactcctagtcgccggcttcaggtcactgccggctgaacggagctgccgtcgccatgtttggctgcttggtggcggggaggctggtgcaaacagctgcacagcaagtggcagaggataaatttgtttttgacttacctgattatgaaagtatcaaccatggtgggtttttatgctgggaacaatcccatttcctgagggaatgggaggatctgtctacttttcttatcctgattcaaatggaatgccagtatggcaactcctaggatttgtcacgaatgggaagccaagtgccatcttcaaa

SEQ ID NO: 35161 - DNA, 418 bp, Homo sapiens
catgagccaccgcacccggcccagtcttggtcttttgacctttggagtcatgcacagcgaacctcttcctttgttctcagagagttcttgggttcccctgaagtttgtttcaagataaacatccccgctgcttcacccttccctggtgtgatccagcgtggctttcacacgccgtccatctccctcgctggcgtgtccctcccagaatcaaaaggcagacttcccggggagatcccaggccatggcggggagcacagccatcgggagttccctgtcaggagtcctgccctcagatttgagagagcagaaccccgccagccccccaacttgcatgcaaaccctggcatgtgtgcctctttcctgagggatcgtgcataaatatcaccagattatctaaaggttgggaaaggatccatga

SEQ ID NO: 35162 - DNA, 486 bp, Homo sapiens
  misc_feature (1)...(486): n = A,T,C or G
gcgcccnnnnattgatgacgtacntagtgcagngncgngggaattccttgggcccgggaggtggaggttgcagtcagccgagatcacaacactgcactctaacctgggcgacagagcaagactccatctcaaagcgaagacaaaaccaaccaaacaaagaaaaagttttagggcagtaaggaaaggaggtaaagtacacttggaagagggtcaagcaggtgacttgagagagtcaagtgcactgtttgatcttggacttggggtttgataggttggcatccttccggggcttgcgttaactttcccctggttcttcccttggggtggtctgtccgcatgcgcagtggcctgccagcgctccggaggggcctcatgcgcagcgtgtttactgaagtgcgcatgctcacttgaggcattcttcctttaccagtcaaatgctcccaggtcatatgccagttaaactccaccatgttgcctcttagtgca

SEQ ID NO: 35163 - DNA, 490 bp, Homo sapiens
  misc_feature (1)...(490): n = A,T,C or G
gtcncaagagaagccgccccnnccaatagaagaccatagatcaccgtcgcggaanncctgcagnctaaggagcccgcctacgtgcgctgcatcaaacccaatgatgccaaacagtccggccgctttgacgaggagctgatccgccaccaggagaagtacctggggctgctggaaaacctgcgcgtgcgcagagccggctttgcctatcgccgcaaatacgaagctttcctgcgaaggtacaagtcactgtgcccagagacgtggcccacgtgggcaggacggccgcaggatggggtggctgtgctggtccgacacctgggctacaagccagaagagtacaagatgggcaggaccaagatcttcatccgcttccccaagaccctgtttgccacagaggatgccctggaggtccggcggcagagcctggccacaaagatccaagctgcctggaggggctttcactggcggcagaaattcctccgggtgaaga

SEQ ID NO: 35164 - DNA, 485 bp, Homo sapiens
  misc_feature (1)...(485): n = A,T,C or G
tggtttgaaagggcagggcnatcganncccttttgagatcctatccgtggcgggaattcgtcagtttaactttttaacagatcttatttttttattttgagtgccactattaatgtaaaaaggggggggctctacagcagtcgtgatgaaacttaaatatatattctttgtcctcgagattttaggaagggtgtagggtgagtaggccatttttaatttctgaagtgctaagtgtttttatacagcaaacaaaaagtcaattttgctttccaccagtgcgagagaggatgtatacttttcaagagagatgattgcctatttaccgtttgacagagtcccgtagatgagcaatggggaactggttgccagggtctaaatttggattgatttatgcactgttatctgttttgacacagatttccttgtaaaatgtgcctagtttaccaaaattaacaaagggggggaaaggaccttagaacttttta

SEQ ID NO: 35165 - DNA, 484 bp, Homo sapiens
  misc_feature (1)...(484): n = A,T,C or G
aggggcctnnnttcgatatcactactccgtgtggtggaattctatgaacacactgggttgggattttctgttgaggatatgcagggcattttggcatgaggcaaatacagaagcaagatttcattctacttggtgagttgaatcatgacagtcctcattccaatctctctttaattctctctggccctgcccacactctgtatttgaaaatcttgtttttgctctttccggagcttcacccctctacttacatattgtaaagttgcataaatctatcattgaaaggtcctctctgccagcagtggtgccaccctttggtttgctgtggtactttgctgtgtactccgcggcatcatgttactgtgtaaataaattcattttaatacacactagatccttgaactgggctggcacaaccctgaaaatctggagccttggctgattgtgtttgagactaccggggcttacactcttacggaccccc

SEQ ID NO: 35166 - DNA, 449 bp, Homo sapiens
  misc_feature (1)...(449): n = A,T,C or G
agggcnnnnnnnnnaattgaatcgacgatccctagtccagtgcggtggaattcttgcagtgtgtgggttcattcacctggtgatcgagggctggttcgttctctactacgaagacctgcttggagaccaagccttcttatctcaactctggaaagagtatgccaagggagacagccgatacatcctgggtgacaacttcacagtgtgcatggaaaccatcacagcttgcctgtggggaccactcagcctgtgggtggtgatcgcctttctccgccagcatcccctccgcttcattctacagcttgtggtctctgtgggccagatctatggggatgtgctctacttcctgacagagcaccgcgacggattccagcacggagagctgggccaccctctctacttctggntttactttgtcttcatgaatgccctgtggctggtgctgcctn

SEQ ID NO: 35167 - DNA, 442 bp, Homo sapiens
  misc_feature (1)...(442): n = A,T,C or G
ngggttnnnnnnaactgattcattacttcgtgcggtggaattcaggaagtcccatggagtcacataattccatctgggagagtcctggagccatcagccctcacaccccctcctcatacaggcgaggaggccctggaggcccggagagcagaaagcactggctggtgtcaagcaagcccagagagaagggcccagttggcaggctgtttttccctggctgtttcagcacagtggctgcaggccttgtgctgaggtttgctgtcactgcctttgggcgcacagagactgggaactcctgggaccggatgtggtcaggcttcctgagagtcgcctggcaggcgaggagtccccagctggcccaccctgagccctgacctcagccagccggctgtccagtgccacacctcctcttgctggtgtcccctcccttgctgacttgtcc

SEQ ID NO: 35168 - DNA, 493 bp, Homo sapiens
  misc_feature (1)...(493): n = A,T,C or G
atgtggctnnnnnttgatcgacgtccctagtccgtgtggtggaattccacgctgaccggcggcttccgcagggggaagttgcagggccatgacgtggacttcctcatcacccaccccaaggagggtcaggaggcggggctgctgcctagagtgatgtgccgcctgcaggaccagggcctcatcctgtaccaccagcaccagcacagctgctgtgagtcccctacccgcctggcccaacagagccacatggacgcttttgagagaagtttctgcattttccgcctaccacaacctccaggggctgctgtggggggatccacgaggccctgcccatcctggaaggccgtgagagtggacttggtagttgcacccgtcagccagttccctttcgccctgctcggttggactggctccaagcttttccagcgggagctgcgccgcttcagccggaaggagaagggcctgtggctgaacagccatgggctgtttgacc

SEQ ID NO: 35169 - DNA, 460 bp, Homo sapiens
  misc_feature (1)...(460): n = A,T,C or G
cggcagctcaactccttccactcggtcatgtgtcagcatggcatggaccctgaactgatcaagcaggtggtcaagcagatgttctacatcataggggccatcaccctgaacaaccttctcctgcggaaggacatgtgctcctggagtaaaggcatgcagatcaggtacaatgtcagtcaactggaagaatggctgcgtgacaagaatctgatgaatagtggggctaaagaaaccctggaacctctcattcaggctgctcaacttttgcaagtgaaaaagaaaacagatgatgatgcagaagccatttgttctatgtgcaatgctttaactactgcccagattgtgaaagtgttgaatttgtatactccagttaatgagtttgaagaaagagtctctgtgtcgttcattcgtactatacagatgcgtttacgagacaggaaagactctccccagctgctcn

SEQ ID NO: 35170 - DNA, 485 bp, Homo sapiens
  misc_feature (1)...(485): n = A,T,C or G
cgggnctnnnnatcgatcgcgctacactagtgccgtgtggtggaattcctgatacttaccaactcttaaagcttagatctagggtatccaaacactgcttcctttccaagaaggaaacatacaaaaaaactaaggcaccatgctctaattctttttttcttttttttcttttttagatggagtcttgttctgtggtccaggctggagggcagtggcatgatctcggctcactacaagctctgcctcccgggttcacgccattctcctgcctcagcctcttgagtagctgggactacaggcgcccgccaccacgcctggctaattttttgtatatttactagagatggctagtgttagccaagatggtctcgatctcctgacctcgtgatctgcccacctcagcctgccaaagtgctgggattactggcgtgagccaccgtgcctggccagcatcctctaattattattcatagtttgcgaattta

SEQ ID NO: 35171 - DNA, 457 bp, Homo sapiens
ggtccacgagatccagtcttgcatgggacgcctggagacggcagacaagcagtctgtgcacatagtagaaaacgaaatccaagcaagcatagaccagatattcagccgtctagaacgtctggagattttgtccagcaaggagccccctaacaaaaggcaaaatgccaaacttcgggttgaccagttaaagtatgatgtccagcacctgcagactgcgctcagaaacttccagcatcggcgccatgcaagggagcagcaggagagacagcgagaagagcttctgtctcgaaccttcaccactaacgactctgacaccaccataccaatggacgaatcactgcagtttaactcctccctccagaaagttcacaacggcatggatgacctcattttagatgggcacaatattttagatggactgaggacccagagactgaccttgaaggggactcagaaa

SEQ ID NO: 35172 - DNA, 482 bp, Homo sapiens
  misc_feature (1)...(482): n = A,T,C or G
agggggtnnnaatcgataccatacgctagtggcgggaattcgaaaatgcacgtctagatgaacgcatttttgctatgtgtcaagtgaaaaaccaccccttggtttaccttatgctcacaactcatcccagtttgtatagagttgacaatctctcagatgagggagcactcaacatcagtgatagaaccatacctcagccccccattcttcagctttcagtggagaagctgagcagagatggagctttcctcatggatgcaggctctgtactgatgctttgggttggaaaaaattgtacacagaattttctcagccaagttctaggagttcaaaactatgcatgaattccacagcctatgacagaccttccagaacttgatacaccacaatctgccagaataatagctttcatctcttggcttagagagcagagaccatttttcccaatactttatgtaataagggatgagagtccaatgaga

SEQ ID NO: 35173 - DNA, 461 bp, Homo sapiens
  misc_feature (1)...(461): n = A,T,C or G
ctgggggcttcgtgctggggctcatcatctgtggagtgggcatcttcatgcacaggaggagcaagaaagttcaacgaggatctgcataaacagggttcctgagctcactgaaaagactattgtgccttaggaaaagcatttgctgtgtttcgttagcatctggctccaggacagaccttcaacttccaaattggatactgctgccaagaagttgctctgaagtcagtttctatcattctgctctttgattcaaagcactgtttctctcactgggcctccaaccatgttcccttcttcttagcaccacaaataatcaaaaccccccnnaaaaaaaaaaaaaaaaaaaaaaaaaaaaaaaaaaaaaaaaaaaaaaaaaaaaaaaagccccccctttaattaaagggcccctaaaaacccccgttaaccccccggggggggtttttttttcccccccccttttg

SEQ ID NO: 35174 - DNA, 427 bp, Homo sapiens
gcgagcagaagcaacatcactcgccatctgcaaaccaatctcattctatttagtgtcggtgctgtgggcgcctgtactctctttgtcacacaaccgtggtacctacaagtggactacactcatgatgccagaaccataaagtgtaccttctccgcaaccggatgcccttctgagcaaccaacatgcctgtggtttcgctacagtgctcaccagcctgaaaaactgtgcttggacgggtgcgaaagtgaggcagacaagttcacagtgagggaggccctcaaagaaaaccaagtttacctcactgcaaacagagtgactctaaatgacagtgcaatttacatctgcggaatagcataccccaacgtgccggaagcgagagctaaacagacaggaggagggaccacactggtggaagagaaattaagct

SEQ ID NO: 35175 - DNA, 438 bp, Homo sapiens
  misc_feature (1)...(438): n = A,T,C or G
aggcnnnnnnnntttgatcgtcgtccctagtccgtgcggtggaattcgtggttggggatcgcttgaggccaggagctcgagacctggacaacatggtaaaaccccatgtctactaaaaatacaaaaattagccgggcgtgaaggtgcatgtctgtagtcccagcaactcaggaggctgaagcatgagaattgccggaacccaggaggcagaggttgcagtgagtcaagatcacaccgctgcaatccagcctgggcaacagagtgagactccatctcaaaaaataaataaataatagctaacatgcattgagtacttgcagtatcccaagacttcacatggattaactcatttaattcaagaattcaatgagacattattatccacattttacagatttgtaatctgatgctaagagaggttaagtagtaaactacctt

SEQ ID NO: 35176 - DNA, 426 bp, Homo sapiens
atttgtttggtttttagcatttatgaggtgagcccatgaagttagtggtccattactttttaaagatgcattttcattttaaactgtctcctggcctgtggatttgtggaatggacagttttgtgggttttaatttatttgtgaggagtcggggctgagaaggcattttatcaggaggtctccttttgcacgtccatgacatgagcttttcggaggcaaaggaagtggaggagggtgagagatgcaggtcactgccagaggcacctctgtgacacggaacattccagacacgtcgcagccttgggcttcggcgaggaggaagtctgagcctgtgaagcgagaaggccaggcagtagactggctctgaggttttgccctttgacctcctccacagagggcagcttcagccccttgtaagccctgccc

SEQ ID NO: 35177 - DNA, 460 bp, Homo sapiens
  misc_feature (1)...(460): n = A,T,C or G
catcgatgaccattagtccagngcggnggaattccgaacgaccaagagggtgttcgactgctagagccgagcgaagcgatgcctaaatcaaaggaacttgtttcttcaagctcttctggcagtgattctgacagtgaggttgacaaaaagttaaagaggaaaaagcaagttgctccagaaaaacctgtaaagaaacaaaagacaggtgagacttcgagagccctgtcatcttctaaacagagcagcagcagcagagatgataacatgtttcagattgggaaaatgaggtacgttagtgttcgcgattttaaaggcaaagtgctaattgatattagagaatattggatggatcctgaaggtgaaatgaaaccaggaagaaaaggtatttctttaaatccagaacaatggagccagctgaaggaacagatttctgacattgatgatgcagtaagaaaactgt

SEQ ID NO: 35178 - DNA, 459 bp, Homo sapiens
  misc_feature (1)...(459): n = A,T,C or G
attatagacgatcattagtccagtgcggtggaattcccgtcaggcccaaaacaggtcaggctgcatgccccccgtggcttcacagaggaccccaaattgtgtttatgtggcttaagctgaggattgctctactggaaggacacgcagaactcagagtccagccctgcagaccactgagactgaggaagtggtgtgcttaagtatcggggggattgcctgtgacatgcaggttctgggcccactctctgcagagtgatttggtagccctgggcaagagcctggaagcctctataacaaggctgctctccccaagcacatcattctgatgcaggtggttctggggcccttctacaacaaggtttggcaaactttttctgtaaaaggccaaatagactgtatggaccatacagtctctgttaaaactacagtagtcacttctgctagagtgaaagcagcctn

SEQ ID NO: 35179 - DNA, 437 bp, Homo sapiens
  misc_feature (1)...(437): n = A,T,C or G
agcggtnnnnnnaatcgatgtcactcgtccgtgcggtggaattcgtcgttttggacggggactgccaaaatccatgagctctacacagctgcttgtggtctctatgtttgctggctaaccataagggctgtgacggtgatggtggcatggatgcctcagggacgcagagtgatcttccagaaggttaaagagtggtctctcatgatcatgaagactttgatagttgcggtgctgttggctggagttgtccctctccttctggggctcctgtttgagctggtcattgtggctcccctgagggttcccttggatcagactcctcttttttatccatggcaggactgggcactttgagtcctgcatgccaaaatcattgcagctataacattgatgggtcctcagtggtggttgaaaactgtaattgaacaggtttacgc

SEQ ID NO: 35180 - DNA, 393 bp, Homo sapiens
ggatcgcacgcggcagctcgaggtgctggcccagcagattgccacgctgtgcgccaccctgcaggagtacccggccatccgctaccgcaagggcccagaggacacagcccagttggcccacgccgtcctggccaagctgaacgccttcaaggcagacactcccagtctgggcgagggcccagagaaaacccgctcccagctgctgataatggaccgggcagctgaccccgtgtccccactactgcatgagctcacgttccaggccatggcgtatgatctgctggacatagagcaggacacatacaggtatgagaccaccgggctgagcgaggcgcgggagaaggccgtcttgctggacgaggacgatgactttggggtggagcttcgccacat

SEQ ID NO: 35181 - DNA, 461 bp, Homo sapiens
  misc_feature (1)...(461): n = A,T,C or G
ntttgatgatcgataggccattgcggaggaattcctagaaatgatattcttcctagtaattgctttttgtttaataatgaagaaaaaaatttagatgtttaagaggaaatatgtgaagacaagttttttcattaaaaataattggggctgggtgcagtggctcacgcctgtaatcccaacattttgggaggctgaggcaggcagattgcttgaacccaggagtttgagaccagcctgggcaacatggcaaaaccccatctctacaaaaaatacaaaaattagccggctatgttagcgcatgcctgtaaccccagctacgcgagaggctgaggtgagaggatcacttaagcccaggaggcaaagtttgcagtgagccgagattgtgtcactgcactccagcctgggtgacagagcaagaccctgtctcaaaaataataattggttaaacttttggaaaaagt

SEQ ID NO: 35182 - DNA, 436 bp, Homo sapiens
  misc_feature (1)...(436): n = A,T,C or G
gcggttcnnnaatgatgatcactactcagtgtggtggaattcatttcattgtgatgttttggttttgttttttgctttttgtttaagttgtgctgacaccaaacacatccagtttataatcagtatattggaaagctggtattgatgtanaaccagtgcataactttttatggggttttgttattggtttttttttgtaaagtgtgaataaaaggtatgtttactcatttttcctgaacactgtgttggtaatgtgcatcatgacaatttccagtgaaggtgagctggagctggttggactaatgagactgaggaagcagcttttcctacgatctgcattatgtaatcacaggtccagagagctttatggaagcgggagaggaggagcacttactcatgttgtatttgttaatggaggatgtcatcttttcataag

SEQ ID NO: 35183 - DNA, 472 bp, Homo sapiens
  misc_feature (1)...(472): n = A,T,C or G
agcggncnnnnnnnaatgagatcgataggcattgcgnggacnnaacagctctgagagcaacagtttcccattaactctttctgaccaatagtgctggcaccgttgcttcctctttgggaagaggaaagggtgtgtgaacatggctaacaatcttcaaatacccaaattgtgatagcataaataaagtatttattttatgcctcagtatattattatttaattttttaggtaatgcctatctcttggtctattaaggaaagaagcaatcagtagagaattcaggatagttttgtttaaattcttgcagattacatgtttttacagtggcctgctattgaggaaaggtattcttccatacaacttgttttaacctttgagaacattgacagaaattatgcaatggtttgttgagatacggacttgatggtgctgtttaatcagtttgcttccaaagtggcctactcaagaggcn

SEQ ID NO: 35184 - DNA, 437 bp, Homo sapiens
  misc_feature (1)...(437): n = A,T,C or G
ggggttnnnnntttgataccttacttcgtgcggtggaattcttaccacttacagccaactgcaccagaatctacttctgaaccttttccgtggcctgggaagtcacagaagataaggagtagataccttgaagacacagatagaaacttgagccgtgatgaacagcgtgctaaagctttgcatatccctttttctgtagatgaaattgtcggcatgcctgttgattctttcaatagcatgttaagtagatattatctgacagacctacaagtctcacttatccgtgacatcagacgaagagggaaaaataaagttgctgcgcagaactgtcgtaaacgcaaattggacataattttgaatttagaagatgatgtatgtaacttgcaagcaaagaaggaaactcttaagagagagcaagcacaatgtaacaaagctat

SEQ ID NO: 35185 - DNA, 454 bp, Homo sapiens
  misc_feature (1)...(454): n = A,T,C or G
nggggggnnnnntttgattatcagtaccatagtgccgtgcggtgtaacttctcacgaccgcgtcagacatgaagagacccaccaggccgaagcggcagacgtagctcgtcctcggatgagggttactgggactgtagcgtgtgcacctttcggaacagcgccgaggccttcaagtgcatgatgtgcgatgtgcggaagggcacctccacccggaaacctcgacctgtctcccagttggttgcacagcaggttactcaacagtttgtgcctgctacacagtctaagaaagagaaaaaagataaagtacaacaagaagaaagtgatgaggaaacaactagcaaaaagaatagccataataaaaccacgccaagattgaaaaatgtggatcggagtagtgctcatcatttggaagttactgttggagatctgacagtcattattacagactttaagg

SEQ ID NO: 35186 - DNA, 460 bp, Homo sapiens
  misc_feature (1)...(460): n = A,T,C or G
catcgatgaccatcagtccagtgcggnggaattcatcagtcccttgggcacagcaggtcctgaacaccctgctctacaatgttgcatcaagagttcaaacaacaaaataaaaaatattaagaggaaatccccatcctgtgacttgagtcccttaagtctacaggggctggtgacctctttttgctaataggaaaatcacattactacaaaatggggagaaaactgtttgcctgtggtagacacctgcacgcataggattgaagacagtacaggctgctgtacagagaagcgcctctcacatctgaactgcatactgagcgggcaagtcggttgtaagttcagtaaaaccctctgatgatgcaaaaaaaaaaaaaaagttttaagtttcccaagctgttggaactcaaatatattttctcagttccaaatcctctgttattttatggaggggaaagccttg

SEQ ID NO: 35187 - DNA, 421 bp, Homo sapiens
ctgtggggagcttcgttccaggtccagagaaggtgatgtccaggctagagccgggactgcctgggggacccatgtcagctgtgtctgtttcctcccaggtcatcaagccaacgttcgcacccccagtgcccccagtcaaacccggggctggtgcggccaaccctggtccagctgagggtgctgttggcccaaaggttgccctgaagccccccatccagaggaagcaaggagccggagctcccacagcaccctaggggggcacctgcgcctgtgtggaaatttggagaagttgcggcagagaagccatgcgttccagcgttccacggtccagctagtgccgctcagccctagaccctgactttgcaggctcagctgctgttctaacctcagtaatgcatctacctgagaggctcctgctgtc

SEQ ID NO: 35188 - DNA, 482 bp, Homo sapiens
  misc_feature (1)...(482): n = A,T,C or G
agggacgggncccgccactgaaanccctagagatcatagcacagngcggnggaattccatattttcttgtcaggacttaccgcaagctatgtatggctccgcggtatgccacccatggaaagacacctcatgcaccattgacctgccaggtcacgtggcctgatggcagcgtcggctgcacaaaagactttcccagctgcaatgccttcgcctgctctaggcccaccccaaagctggcagtcttctaggtcagttggtaaatgggttagaacaagatgccccaaagtggcataaattgcatggaattaggccttagtggcgagggattcgacatacagtcatttgtcctacattgtgaaggaaacattctgacctcaaacagatccctcaaccccagaactttatagaaggggcagaccttggcattttcacatgatttatctcccactctgattcacatatgtttgaccaaggcactgggc

SEQ ID NO: 35189 - DNA, 451 bp, Homo sapiens
  misc_feature (1)...(451): n = A,T,C or G
agggggntnnnncctcgatgatcactacttagtgcggtggaattcggctgggcatggtttctcatgcctgtaatcccagaactttgggaggctgaggcaggtggatcaccggaggttaggaattcaagactgaaaccttgtctctactgaaaatacccaaaaaaaaaaaaaaaaaaatggccctgggggggggggaaggcccctgaaatccaattaatttgggaaggttgaggaagaaaaatcctttaaacccagaaggaaaaggttgcaggaaccaaaaatcgccccttggaactccacccggggaaaaaaaagggaaaactttgtttaaaaaaaaaaaaaaaaattgggggaaaaaacccttttatataaaaaaccaaggttcaatttttggaaaaaaaaaaaccaattttttaaaaaagggccaaaaaaaaaaaagcctttaaccttt

SEQ ID NO: 35190 - DNA, 443 bp, Homo sapiens
  misc_feature (1)...(443): n = A,T,C or G
agcgctcnnnnnnnatcgatcgacgtatccttantccgtgcggtggaattcgcagactgtgagacacaggggtgtttttaaaaggcagagcaagcctcagacagatgccatggcgtggcctttctgacactcctgggcgtccccatgggtgagctgaattctgcctctggactagcccttttccagccaattccactgatcctgtgaaggctgcccaatttgagccacctggacgtcaaatgattgccatcagaaagagacaacttgaagaaaccaacaatgactatgaaacagctgacggcggctacatgactctgaaccccagggcacctactgacgatgataaaaacatctacctgactcttcctcccaacgaccatgtcaacagtaataactaaagagtaacgttatgccatgtggtcatactctcagcttgctgagtg

SEQ ID NO: 35191 - DNA, 386 bp, Homo sapiens
cagggcatgaccctgtgcgggagaggctcaagcgggacctgttccagtttaacaagacggtggagcatggcttcccgcaccagcccagcgccctcggctacagcccgtccctgcgcatcctggccatcggcacccgttctggagccatcaagctctacggagccccaggcgtggagttcatggggctgcaccaggagaacaacgctgtgacgcagatccacctcctgcccggccagtgccagctggtcaccctgctggatgacaacagcctgcacctttggagcctgaaggtcaagggcggggcatcggagctgcaggaggatgagagcttcacactgcgtggacccccaggggctggccccagtgccacacagatcaccgtggtg

SEQ ID NO: 35192 - DNA, 468 bp, Homo sapiens
  misc_feature (1)...(468): n = A,T,C or G
cgagtcccccttttgatactttgaaaccgtcgggaanncgaactatattattttacccttgggagcccaccagcaagaatgagttggagcaatcttttcatgtgatctccttaacagatatttactgaaggaatctaggttgtattttcaggggacaatgggaataaagcatttctaaagcaccgactggagaggaaggcaacagagacaaggagagaagccgagagacatgtctgcgtgctgccacgcatctgagcgattgctctgtgaagagttgtacactgaacattttcaggggaggctgtttacccaggcaatgtcctcaaacaagcctgtgccggggtgtcctggaatctgagccaggactgtgtttttagcccttcacctctcagctttagcaggacatgaaccagttataacaagatggccctgcagctggttacaagaatgtgacatggcaggatctat

SEQ ID NO: 35193 - DNA, 461 bp, Homo sapiens
cttcgattgtacgatccttagtccagtgcggtggaattcgatctgcaccgtgccctggagctcacccgccgcctgctctcccttgacccaagccacgaacgagctggagggaatctgcggtactttgagcagttattggaggaagagagagaaaaaacgttaacaaatcagacagaagctgagctagcaaccccagaaggcatctatgagaggcctgtggactacctgcctgagagggatgtttacgagagcctctgtcgtggggagggtgtcaaactgacaccccgtagacagaagaggcttttctgtaggtaccaccatggcaacagggccccacagctgctcattgcccccttcaaagaggaggacgagtgggacagcccgcacatcgtcaggtactacgatgtcatgtctgatgaggaaatcgagaggatcaaggagatcgcaaaacctaaacttgg

SEQ ID NO: 35194 - DNA, 480 bp, Homo sapiens
  misc_feature (1)...(480): n = A,T,C or G
aggggtgcccccttttgagaccatagaccacgtcgcggaannctaaaacccccatcgaaactctcatccgcgatatgttactgtctgggagcagcttcaactggccttacatgtccatccagtgctcctagaccttgggcgcttcccacctgccccgtccccctagagactcagaggacccacctgggccaaggactccaaagccgcggggacaccgggaagtgcagcgggccaggcaggctgggtgggagggaggagggccgagacaggagcagcccacccagcagaaatacaatccgagctacaaagcatgggaaaaagagactcttttaggatcagatctgtgagcacgttggcgaggaaaaacaaaacaaacaaaaaaaagaaccttgtgtctgtctggtgaaaaaaagaaaaacaaattggaagagaggaccatgagaattttaataaaacagaaggaaactaatggaccttccn

SEQ ID NO: 35195 - DNA, 463 bp, Homo sapiens
  misc_feature (1)...(463): n = A,T,C or G
catagagaccatagaccaccgtcgnggaattctctgggattacaatgaatgtaagcccaaattgtggaattgccagtaacctggatggggaaaagcatttcccatagcactccatgtaatatgagtgctctgtgagatgttcatcagtgttttatagaaatggtgttgctgggaaaccaagtttgcacctggaaacttacaatgcactttagcgcagtaagggcttggcatccggtagtgaaaaactgtctaacccagcattgcccaaactattttgacaccaggacctttttctcctttgggatacttatgaacctctcactaatgtcctgtggagaacattttgggaaacactatgttagatagttctttaaggagacaaaacggtaatgaacagatagcactggggcagaatatgcatgcattttgtaacgtccagtgtggcgttgaatagatgtgtatt

SEQ ID NO: 35196 - DNA, 483 bp, Homo sapiens
  misc_feature (1)...(483): n = A,T,C or G
gccccccccccnnaggnnnttcgagtccctagtccgtgttgtgaaactatgtgagaaccccccagacctccatacagggaagcaaaagctgtttctcctcccagagatgctaagaggattgaggtagagaagaaccttgttttctctgttgtctttttctttttacttttttaattttttgagacggagttttgctcttgttgcccaggctggagtgcaatggtgcgatctcgactcactgcaacttccacctcctggagtcaagcgattctcctgcctcagccacccaagtagctggaattacaggcacctgccactatgcccggctaactttttgtatttttagtagagatggggtttcaccatgttggctaggctggtctcgaactcctgccctcaggtgatccacccacctctgcctcccaaagtgctgggattacaggcgtgagccacctcacctggccttttcttttttattctttg

SEQ ID NO: 35197 - DNA, 224 bp, Homo sapiens
actaaggagagtaaagtcagcatgagcaaaaactccaaactcctctccaccagcgccaagagaattcagaaggagctggcggacatcactttagaccctccacctaattgcagtgctggtcccaaaggcgataacatctatgaatggagatcaaccattctatggcctccaggatccgtgtatgagggtggcggattctttctcgatatcacttttacaccagg

SEQ ID NO: 35198 - DNA, 486 bp, Homo sapiens
  misc_feature (1)...(486): n = A,T,C or G
cccccccccccnncccatagagatcctagatgacattcgcccagngcggnggaattccggcgccgcgcccatagccggacggggatctgagctggcaggatgaatgtgggggtggcacacagcgaagtaaaccccaacacccgagtgatgaatagccgaggcatctggctggcctacatcatcttggtaggattgctgcatatggttctactcagcatccccttcttcagcattcctgttgtctggaccctgaccaacgtcatccataacctggctacgtatgtcttccttcatacggagaaagggacaccctttgagactcctgaccaaggaaaggctcggctactgacacactgggagcaaatggactatgggctccagtttacctcttcccgcaagttcctcagcatctctcctattgtgctctatctcctggccagcttctataccaagtatgatgctgcgcacttcctcatcaacacagcn

SEQ ID NO: 35199 - DNA, 494 bp, Homo sapiens
  misc_feature (1)...(494): n = A,T,C or G
ntttgtcgacatcactagtccagngnggaggaattcccgccgcgctcccagcatggctgtctctgcagtcgagggcaaggactctgcgtgcattctccactgacgtctactcggccactccggtcccgacacctagcctgccggaaagaacacccggaaatgaaaggccaccaagaagaaaggcactacctcctaggacagagaaaatggctgttgaccaggactggcctagtgtttacccagttgcagcaccatttaaaccctctgcagtacctcttcctgttcgaatgggttatccagtaaaaaagggcgtgcccatggcaaaggagggaaatctagaacttttaaagattcccaattttctgcatttgactcctgtagcaattaaaaagcactgtgaagcccttaaagatttttgcactgagtggccagccgcactggacagtgacgagaaatgtgagaagcattntccaattgaaattgacagcactgan

SEQ ID NO: 35200 - DNA, 462 bp, Homo sapiens
caacgatgaccactcgtccagtgcggtggaattcggttgttaaactgaagcaaatagagcatactttgaatgagaaaagaatattacaggcagtgaattttcctttccttgttcgactggagtatgcttttaaggataattctaatttatacatggttatggaatatgtccctgggggtgaaatgttttcacatctaacaagaattggaaggctcagtgagccccatgcacggttctatgcagctcagatagtgctaacattcgagtacctccattcactagacctcatctacagagatctaaaacctgaaaatctcttaattgaccatcaaggctatatccaggtcacagactttgggtttgccaaaagagttaaaggcagaacttggacattatgtggaactccagagtatttggctccagaaataattctcagcaagggctacaataaggcagtggatt

SEQ ID NO: 35201 - DNA, 472 bp, Homo sapiens
  misc_feature (1)...(472): n = A,T,C or G
gggagggnnccccctctgagaccttgaaacntctgggaanncgngccagaaggagcccccatcacagtgacctgtgcggaccctgctgcccacgcaccctcactctattcttggtaccacaacggtcgctggctgcaagagggtccagctgcctcactctcattcctggcggccacgcgggctcatgcaggcgcctactcttgccaggcccaggatgcccagggcacccgcagctcccgtcctgctgccctgcaagtcctctgtgagcagagggtccttggccagggctgcccaggaggagggcggtggagggcgcttctgggctctggcgggagagggcaaaggactgcagtgggcccaagaatgggcagttggagaaagaggacatacgtgctagagaaagagacagtcctataagccctgcctggagcactctgcccacaagactcctgggaaggtgtcacttctatgn

SEQ ID NO: 35202 - DNA, 425 bp, Homo sapiens
atggctgtgtgaacactgaaaattatgagggtcaacataaaatcagcattacaggtactaaaacataaatcctgatggctttcaccgttttcttaagagcaaaattgcaaaaagtgatattaacagtcatcctagacgaatatgagcaaatgatttgtttttccttaaaagagcctccaagtgtattgtgatcattttcacactgatcaaagagagcacccttctgtcaacaggtatctgcagttttcaggacctggcagaaattcttctatgttctgcctttaaaggtcaggtacaaaagcagagacagctgccaggcccctctgcccagagctaagtgtctgggaccatgagtgggaaggacaggcttgagcctccttggtcctccagacagcatggggcgctacttgccccttctgcagctg

SEQ ID NO: 35203 - DNA, 428 bp, Homo sapiens
  misc_feature (1)...(428): n = A,T,C or G
gatctctggcacaaccagcttcctggagttacctcagcagaagactagaattagagaaaagggaaagaccttttcttctagtaagtgtcaagtacagatgctctttgacttatgatggggttatgtcccagtaaacccattggaagtcaaatgcatttaatacccctgactggacaccacagcttagcctcgtccaccctaaatgtactcagaacacttagaattgcccacagttgggcagaatcatctaacacaaactctattttataatcgagtgttgaatatatcatgtaatttattgaatattgtacattatgttgaaattgcaaccatttcacaccattgtaaagtccaaaaatcagaagctgaggactgtctgtacatgacattgaatcacatgaatggattactanggcctgaggggtgtc

SEQ ID NO: 35204 - DNA, 466 bp, Homo sapiens
  misc_feature (1)...(466): n = A,T,C or G
cctaggccccctgatgaccctcggacangcggcggaattcggtaaatgagcagtggagaaagagagctgcggacaaggcaaaatctcattaagttcttacctctagtacaataaggcgaacctcctctttggatacaataacaggaccttacctcacaggacagtggccacgggatcctcatgttcactacccttcatgcatgaaagacaaagctactcagacacctagctgttgggcagaagagggtgcagaaaagaggtcacatcagcgttctgcgtcatgggggagtgctgatcaactaaaagagatcgccaaactgaggcagcaactacaacgcagtaaacagagtagtcgtcacagtaaggagaaagatcgccagtcacctcttcatggcaaccatataacaatcagtcacactcaggctactggatcaaggtcagttcctatgccactgtcaaatatatn

SEQ ID NO: 35205 - DNA, 420 bp, Homo sapiens
ggaggaactgaagaggggggcagtttcagggaaaatagcccttagcctttttagtcgatgccaccctttctgtcacctggagaccttgtacttctcttgcactaataaccccggtgcttttgtggctgggggtttttctgttgctgctgctgcctccaccactgctgtgaattcacccatggtgcattggacactggatcttgaactccagagtctgtttagggaggtgagcacagggctgggggaggtgcggcggggcccagaagaccaggccactgagcccgcactccaggctgtgacggtccaaaccacggcactggagctgcagggtctgcctagtgggctctgcattccccgagagcacgagtttggcacatgggagaatggagcccgtggagaaccttctggggggtcggagag

SEQ ID NO: 35206 - DNA, 424 bp, Homo sapiens
  misc_feature (1)...(424): n = A,T,C or G
gtttccgcaacttcctggattatcctcgccaaggactttgcaatatatttttccgccttttctggaaggatttcgctgcttcccgaaggtcttggacgagcgctctagctctgtgggaaggttttgggctctctggctcggattttgcaatttctccctggggactgccgtggagccgcatccactgtggattataattgcaacatgacgctggaagagctcgtggcgtgcgacaacgcggcgcanaagatgcagacggtgaccgccgcggtggaggagcttttggtggccgctcagcgccaggatcgcctcacagtgggggtgtacgagtcggccaagttgatgaatgtggacccagacagcgtggtcctctgcctcttggccattgacgaggaggaggaggatgacatcgccctgcaaatcc

SEQ ID NO: 35207 - DNA, 425 bp, Homo sapiens
atttcagaatatgacctgtgagctccatctgacttgctctgtggaggatgcagatgacaatgtctcattcagatgggaggccttgggaaacacactttcaagtcagccaaacctcactgtctcctgggaccccaggatttccagtgaacaggactacacctgcatagcagagaatgctgtcagtaatttatccttctctgtctctgcccagaagctttgcgaagatgttaaaattcaatatacagataccaaaatgattctgtttatggtttctgggatatgcatagtcttcggtttcatcatactgctgttacttgttttgaggaaaagaagagattccctatctttgtctactcagcgaacacagggccccgcagagtccgcaaggaacctagagtatgtttcagtgtctccaacgaacaaca

SEQ ID NO: 35208 - DNA, 422 bp, Homo sapiens
atatgacttcaagtcaggccagacctaagtcaagtacgggcttgaggacttcctcattggctccggcctcaagaccatgtccatcgtgagttacaaccacctgggcaacatcgatggggagaacctatcggcgccattgcaggtccgctctaaggaggagtccaagagcaacgtggcggacgacatggagcagagcaacccagtgctctatacgcccggcgaagagcctgaccactgcgtgtgcatcaagtatgtgccgtacgtgggtgacagcaagcgcgcgctggatgagtatacctagcagctgatgctggtcggaaccaacacactggagctgctcaacacgtgtgaggactcgctgctggccgcacccatcatgctggacctatcgctgctgaccgagctgagccagcgcgtgagct

SEQ ID NO: 35209 - DNA, 487 bp, Homo sapiens
  misc_feature (1)...(487): n = A,T,C or G
agcgnnctnnnntttgtcgcgttccctagtccgtgtggtggaattcgcaagacgatgacttgcaaaatgtcgcagctggaacgcaacatagagaccatcatcaacaccttccaccaatactctgtgaagctggggcacccagacaccctgaaccagggggaattcaaagagctggtgcgaaaagatctgcaaaattttctcaagaaggagaataagaatgaaaaggtcatagaacacatcatggaggacctggacacaaatgcagacaagcagctgagcttcgaggagttcatcatgctgatggcgaggctaacctgggcctcccacgagaagatgcacgagggtgacgagggccctggccaccaccataagccaggcctcggggagggcaccccctaagaccacagtggccaagatcacagtggccacggccacggccacagtcatggtggccacggccacagccactaatcaggaggccaggccc

SEQ ID NO: 35210 - DNA, 425 bp, Homo sapiens
  misc_feature (1)...(425): n = A,T,C or G
attttcctcatctaggctgtgtcactattgggtgcaaggatatcattgttggctagattcattttgtataatcatgtatcctcttgtgtgctggtagagattttaatcctgatttttccataaaacatgagtattaagaaataattcctggtttggagaaactggagaaatcacccttttaaggaagaaacactggaaatttctgctaacaccaagatatttaagagtgtacatagtaggtgctcaacaaatttattgaatgaatgagtgaatggaaaaactgggagagtcaaaagtgagcagaagctctccatttctacttctgtcacaaaccacattaaattgtaaataaggcccttctccacttgacttcaggcagcagattgtctagaagcctaaggacagcaatttctctgacaagacan

SEQ ID NO: 35211 - DNA, 453 bp, Homo sapiens
  misc_feature (1)...(453): n = A,T,C or G
natcgagatcgctagtccagtgcggnggaattcggcctgggtgggctcaggggctgcccttgacctggcctagagccctcccccagctggtggtggagctggcactctctgggagggaatgagtgggaatggcaagaggccagggtttggtgggatcaggttgaggcaggtttggtttccttaaaatgccaagttgggggccagtggggcccacatataaatcctcaccctgggagcctggctgccttgctctccttcctgggtctgtctctgccacctggtctgccacagatccatgatgtgcagttctctggagcaggcgctggctgtgctggtcactaccttccacaagtactcctgccaagagggcgacaagttcaagctgagtaagggggaaatgaaggaacttctgcacaaggagctgcccagctttgtgggggagaaagtggatgn

SEQ ID NO: 35212 - DNA, 443 bp, Homo sapiens
  misc_feature (1)...(443): n = A,T,C or G
gtcatggcggaggggacggcagtgctgaggcggaacaggccgggcaccaaggcgcaggatttctataattggcctgatgaatcctttgatgaaatggacagtacactagctgttcaacagtatattcaacagaacataagagcagattgctccaatattgacaaaattcttgaaccacctgaaggccaagatgaaggtgtgtggaagtatgaacatttaaggcagttctgccttgagctaaatggacttgctgtcaaacttcagagtgaatgccatccagatacttgcactcaaatgacagcaactgaacaatggatttttctttgtgcagctcataaaactccaaaagagtgtcctgctatagactatactagacacacacttgatggtgctgcatgtcttctgaatagcaataaatattttcccagcaaggttagcataan

SEQ ID NO: 35213 - DNA, 460 bp, Homo sapiens
  misc_feature (1)...(460): n = A,T,C or G
cttcgatgaccattcgtccagngcggnggaattcttcacagtgttcatgattgcagtgtctggaatttgcatcctgctgaatgtcactgaattgtgttatttgctaattagatattgttctgggaagtcaaaaaagccagtttaacgcattgcccagttgttagattaagaaatagacagcatgagagggatgaggcaacccgtgctcagctgtcaaggctcagtcgccagcatttcccaacacaaagattctgaccttaaatgcaaccatttgaaacccctgtaggcctcaggtgaaactccagatgccacaatggagctctgctcccctaaagcctcaaaacaaaggcctaattctatgcctgtcttaattttctttcacttaagttagttccactgagaccccaggctgttaggggttattggtgtaaggtactttcatattttaaacagaggatan

SEQ ID NO: 35214 - DNA, 461 bp, Homo sapiens
  misc_feature (1)...(461): n = A,T,C or G
cattcgatgaccattagtccagngcggcggaattcctcctagagaacaaaatgaacagtgatgaaataaaaatgcagctaggcagaaataaaaaagcaaagcagattgaaaatatcgttgacaaaacttttttccatcaagagaatgtgagggctttgaccaaaggagtccaggctgtgatgggttacaagcccgggagtggtgtagtgactgcatccactgcgagctctgagaacggggcggggaagccctggaaaaaacatggcaacagaaataaaaaaggaaaaagtcgtagactctacaagcacctggatatgtgaggttgggctgcaacagaaatgtcatctgcattgtgcagatggaaaagagcagaagctgcctgttgcctgtggaactgtcccaagacactagcactgtagaacgggccctgctcttgcagagcacggctgcacccaacagtn

SEQ ID NO: 35215 - DNA, 463 bp, Homo sapiens
  misc_feature (1)...(463): n = A,T,C or G
catggagaccatagatcaccgtctgggaannccacctattggatatggagcctttggtgttgtctggttgagaatctgtagtactgagatgtttctccactatcagccgagattaacagccacagctggattctttgggggctctgctttgtgaaaagagctttgaagaagcagagcctgcaccataaaaaggaaacggttgctcttctagacataacaaagcatccgtatgaaactagaaatgtggaaatctgtattgttaattttaactacaaacgaacttacttttggaaattacaggttcatgatcataaagtagataaagagtagagaataaaagtaacaatctgatgattctgcacccacttcttggtggttgaaactccatagcctataacgttgcaagtcattttgtacttagactcctgaaaagattatccaaattatgttcaaaaaaccacag

SEQ ID NO: 35216 - DNA, 461 bp, Homo sapiens
  misc_feature (1)...(461): n = A,T,C or G
ntttgatcgaccgaccattagtccagtgcggtggaattcccggctcgagatgtgagtagtgagagcgcctaccccatacgtgctgccgctccccttcttttacccagtgatctagacctagtctaggacctcgggaactaggaccagcctccctccttcttggagatctgaccctcaggattcagcgccttcgctcacgagctccaaccctccgcatgcccaagccccgccctctaagcgtttaggcctcgccccctctcgcgctgcttaggacttcggtccagtcactcttcacccaatctctgcccccagtaccccaggtccggccttcacactgaaatcctaagactacagacttatttagggacctctatgactcctacacccatcctcagagctccaggttcctcccccttgatcaccaaactttaccttttgaaccttccagatctgcctgggac

SEQ ID NO: 35217 - DNA, 462 bp, Homo sapiens
  misc_feature (1)...(462): n = A,T,C or G
ntttgagtccgtagaccactagcaagngcggnggaattctaatgatattggacatagagatctgaaactggaaaatataatggttaaatttagtcttattgatgataacaatgaaataaacttaaacataaaggtgactgattttggcttagcggtgaagaagcaaagtaggagtgaagccatgctgcaggccacatgtgggactcctatctatatggcccctgaagttatcagtgcccacgactatagccagcagtgtgacatttggagcataggcgtcgtaatgtacatgttattacgtggagaaccaccctttttggcaagctcagaagagaagctttttgagttaataagaaaaggagaactacattttgaaaatgcagtctggaattccataagtgactgtgctaaaagtgttttgaaacaacttatgaaagtagatcctgctcacagaatcacagn

SEQ ID NO: 35218 - DNA, 438 bp, Homo sapiens
  misc_feature (1)...(438): n = A,T,C or G
gcggggncnnnaatcgatatgcactacttagtgtggtggaattcgcattttagatctaattcaagtatttgtggaaacattagacaaatgttttgaaaatgtctgtgagctggatttgattttccatgtagacaaggttcacaatattcttgcagaaatggtgatggggggaatggtattggagacaaatatgaatgagattgttacacaaattgatgcacaaaataagctggaaaaatctgaggctggcttagcaggagctccagcccgtgctgtatcagctgtaaagaatatgaatcttcctgagatcccaagaaatattaacattggtgacatcagtataaaagtgccaaacctgccctcttttaaataaaaatgtaaaaaggccactcccaggtaaaatccagggggaagagtcatctaagtttaccatgcagt

SEQ ID NO: 35219 - DNA, 475 bp, Homo sapiens
  misc_feature (1)...(475): n = A,T,C or G
ggcatgcaggccatacggaatacgtaggctcctcgcacagngcggnggaantcgtnnncgcagctgcctggattatcctcgccaaggactttgcaacatacttttccgccttttctggacggattccgctgcttcccgaagggcttggacgaacgctctagctctgcgggaaggttttgggctctctggctcggattttgcaatttctccctggggactgccggggagccgcatacactgtggattataattgcaacatgacgctggaagagctcgtggcgtgcgacaacgcggcgcacaacatgcagacggcgaccgccgcggcggaggagcttttggtggccgctcagcgccaggatcgcctcacagtgggggtgtacgagtcggccaaattgatgaatgtggacccagacagcgcggacctctgcctcttggccattgacgaggaggaagaggatgacatcgtcctgctaat

SEQ ID NO: 35220 - DNA, 436 bp, Homo sapiens
  misc_feature (1)...(436): n = A,T,C or G
aggcnnnnnnnnatcgatcgacgtccctagtccgtgtggtggaattcgcaccggctcccattccggctccagcctccaatccgacccccatttcggctgcagcctcggacctagctccggccctcggtctatccgggtgcatcctccctccctgttccggatcttatcttgcgccagcgcctactccaggatcccgtagccagacctcaagccatggctggtcccttctcccgtctgctgtccgcccgcccgggactcangctcctggctttggccggagcggggtctctagccgctgggtttctgctccgaccggaacctgtacgagctgccagtgaacgacggaggctgtatcccccgagcgctgagtacccagacctccgaaagcacaacaactgcatggccagtcacctgaccccagcagtctatgcacggc

SEQ ID NO: 35221 - DNA, 435 bp, Homo sapiens
  misc_feature (1)...(435): n = A,T,C or G
gcggggnnnnnnatgatcgccactcgctagtgtggtggaattccgctgtgctgactttgagtgggatcaacatctgtcctacgggtcccctcttttttggccccagtattcatggcagggtttgttggacacctactagcttcccttcccattcaacacaaacacacattcttgctctacccaaagctctggctggcagcactaaatgctttggtggtgtttgcactgtgtcctttccaggccttggccagttcttccaggggtgaggcatgtggtgctggggattggcagccgtcctggggcccacacaggtgtgtcttgctccatttggcccattgtgtgttactttgtgaatgagccatttcacatggacttcatgaaatttgcctcctgagttcaggtttaccctgaaagggatgcagattatcctgttcc

SEQ ID NO: 35222 - DNA, 485 bp, Homo sapiens
  misc_feature (1)...(485): n = A,T,C or G
agtganctnnncctgatgatcctactccagtgtggtggaattcggcgcggccaccagagcacctgttgcgttttgggccagggcaggtcccgggtggccaggagaggacaggtaaagctagagcagtggccgcaggaacagagcaatctggaaagatgtcagagaggtggtgaagcctactgatgcaagggcaaagccccagggacggtgacagggccacaccctcctaaagtgtaccttgggtacaggtcttttctctcccacaggcccctgtctcccagcctgatgcccctggccaccagaggaaaggtaatacttacaaaaactcggcactagccagcactaagagggtttgtcatgggccctgattccaggtgtccatcatcttgtgtaactcccctagaagattcaaactattattctacccatttcacagaggaggaaattgaggcagtggggttactgggatctggataaacagggcn

SEQ ID NO: 35223 - DNA, 484 bp, Homo sapiens
  misc_feature (1)...(484): n = A,T,C or G
gcnaagggcgnnnnnnnaatgagaccctangaagnngcgnggaattaacaggccctggaagaggcggcaacagctgacctggatatcaccgaaataaacaaactatcagcagaagctattcagacacccctgaaatctgccaaaacacgaaaggtaatacaggtagatgaaatgatagtggaagaggaagaagaagaagaaaatgaacgtaagaatcttcaaactgcaagagtcaaaaggtgtcctccatccaagaagagaactcagtccatacaaggaaaaggaaaagggaaaaggtcaagccgtgctaacactgttaccccagccgtgggccgattggaggtgtccatggtcaaaccaactccaggcctgacacccaggtttgactcaagggtcttcaagacccctggcctgcgtactccagcagcaggagagcggatttacaacatctcagggaatggcagccctcttgctgacagcaaag

SEQ ID NO: 35224 - DNA, 465 bp, Homo sapiens
  misc_feature (1)...(465): n = A,T,C or G
ctcgacaccactggaaccgtcggcangttcnggaaaaaaccgcaaccgagtcaggtcagtcttcggtattggggaagggtgtaattcatcgactcccaccaatcaaacttccctcaagcgcaggaaatagttcctcaggtaactattttacaccacaacagacaagcagctttctcaaatctccaactcctcctccttcttctaagccatcaagtattcctcggaaatcatctgtggatctcaatcaagttagcatgctttctccagctgccctatcacctgccagctcatcacaaagaaccacggccacccaggtcatggcaaactctgctggacttaacttcatcaatgtagtgggctctgtttgtggggcccaggctttgatgagtggttcaaaccccatgctgggctgtaacactggtgccataactcctgcaggaataaacctgagcggccttctaccct

SEQ ID NO: 35225 - DNA, 503 bp, Homo sapiens
  misc_feature (1)...(503): n = A,T,C or G
aggcnccnnnnnnnattgacgagcatcatagtccacgtggaggaattccgttccccaaatgagggtctgcagcttgcactgacccctgagttcctcacccaccagccccgtgccgacccgtctaacccgtgtgggggtgctccactcaaataggcccttggcagaaaagattgtccgttctgtccacacactgcctggatacagtctccagctctaggagatggaattggtttgctccatttagaaatagatcaaaactgggcattcagtagatggtaccaatatcttcctgtactgggaaatactaaatttagattgtgaatatttacctaatgataatttttagagaaggagatatcatagatgagtatgattgggaagttcagaaaactaaaatttgatttttacagccatccaactatagaatcattagaatttagtcatttatggataaattaaaatgaacacctggactcttgttaaaatcagaaagtccacaccaa

SEQ ID NO: 35226 - DNA, 218 bp, Homo sapiens
ctgcacttattattttttgatagtagccattctaatgggtgtgagatggcatctcattgtggctttatttccctaaagactactaacgctgagcattctttcgtgcgcttgttggccatttgtatattttctttggagaaatgactgttcaagtctttcataacagatctttatagaggctaatattaaccccttatcatatatatgatgcgcacata

SEQ ID NO: 35227 - DNA, 472 bp, Homo sapiens
  misc_feature (1)...(472): n = A,T,C or G
aggtgaggnnccccccctttgagatctagtcacgtggggaattccctccccagagaagccttccttattttggagtaaggtcctaagatagctggatgaatcaggaaaaccatgtcccctctaggtattattaatataagcaggaagggatctactataggaatgaagtatttataaaccactgaaagggatagagaagtgaacattggagaaagccagtagcaactgtgagaaatcagcaacttgcaggaggcacagaaaactcctgctgatggtctcagcttccagcagcacaaaagcagatgatgtactggaaaatgctcagaagatgctacaaaacctcatgcctactgtctgccactgctggagaaggaatcatggtttctagaagtgcctctcattagtggactttaaagcaaatcctggctggcaggaaattctgaggaatatagctcttatgcttccagcctct

SEQ ID NO: 35228 - DNA, 457 bp, Homo sapiens
  misc_feature (1)...(457): n = A,T,C or G
nttcgatgaccattagtccagtgcggtggaattcctcattggatgcttatttttacttttaaaacatttattttaattgctaaaattatctacattttctccttgtgagctgttttgttcccttacatcaatcctaatcccaatgccatactagaaagtaacactgttatgaaagtgttatttatcaatccagatattaattttttgtttgtttgtttgttttttttttgagatggagtttcactctgttgcccaggctgaagtgcagtggcacaatctcagttcaccacaactgctgcctcccgggttcaagcgattctcctgcctcagccttcctagtatctgggactacaggcgcacgacaccatgcctggctaatttttgtatttttagtagagacggggtttcactatgttggccaggctggtcttgaactcttgaccttgtgatccacccc

SEQ ID NO: 35229 - DNA, 422 bp, Homo sapiens
cttgggtagtcccctctaggaccatggtatccgagggtggagctccgtgggttgacactttttctgtgaaaagaacactgacacaccagtctgggtgggtttttaatcactgtaactgcagtattttgtacaagtgtctaaacattgtttacaagactaaggcccacttccctgcaggctgacctgaacctcagggggtagctgatcctgtcattctggtcaccaaacaggagggtcctggcactacccagatttccacagtgctgctaatatcccagctccagccagcaccccatctgcacctgaatcctctaacttcacggtagcacttacagctgaagccatcagcatctggcaggcacacctgagtcaccatgtagcgctgctactggaggtagagacggccctttgagatggtgccc

SEQ ID NO: 35230 - DNA, 394 bp, Homo sapiens
cgctcttggacctggttgtctttggtcgggcatgtgccctgagcatcgaagagtcatgcaggcctggagataaagtccctccaattaaaccaaacgctggggaagaatctgtcatgaatcttgacaaattgagatttgctgatggaagcataagaacatcggaactgcgactcagcatgcagaagtcaatgcaaaatcatgctgccgtgttccgtgtgggaagcgtgttgcaagaaggttgtgggaaaatcagcaagctctatggagacctaaagcacctgaagacgttcgaccggggaatggtctggaacacggacctggtggagaccctggagctgcagaacctgatgctgtgtgcgctgcagaccatctacggagcagaggcacggaaggg

SEQ ID NO: 35231 - DNA, 475 bp, Homo sapiens
  misc_feature (1)...(475): n = A,T,C or G
gcagtgcccccnttagaaaaccatgatgatcgtcgcacagngcggnggaattcaaaggaaggaggaggtaacttgtggaatgctgagaaaggtaaaaacactttcaaatatggaagaggaacaggctatgacctaatgcttgcttggaccagtatatgcatgccggggcaaatatttaggctaaattgtgggagctaagaacttaaagtacattgatttctttatcatggctagcagatatttaagaatgttagtacgggtctttgaatacattttgcttctaagagaagttactatttattcctaattagacagggaggaaagtctttgaagaggaacctctagtttttacaccaactcactttattcatttactcaaatgccttacaggtctttgagtttgaaaccccaagtaagtaaaataattcatgaaaggtaataaaaacagagtctggcacatagttaggttttcagt

SEQ ID NO: 35232 - DNA, 394 bp, Homo sapiens
  misc_feature (1)...(394): n = A,T,C or G
catggccacctccccattttctgtgccttatctcactgtttcagctgagtccaagttgtttactctgttcctctccagaggggctctctgtcccagttgggcagctcacctttgggacataagcctttgccccacaagctgtggagagggccaaaaccaagctgcttgagcccactctcttgctgagagtccaggcctgcctgcctgccagccagaggtgccccttatgcacatccagtcctaccagcctgcttccaggagcctagagtgggaaaggcacctgggggagccctggtgaagggctggacctgacccatggaggcaggaggaagacctggctttcttggtttgtccggccctggggagcagccttccctactcactttccccttgn

SEQ ID NO: 35233 - DNA, 387 bp, Homo sapiens
cccggatcgaatccgcttcccaagaggcactgccagtcgtagcactttccacggccagccccgggaacggcgaaccgcaacatataatggccctcctgcctctcccagcctgtcccatgaagccacaccattgtcccagactcgaagccgaggctccactaatctctttagtaaattaacttcaaaactcacaaggagtcgcaatgtatctgctgagcaaaaagatgaaaacaaagaagcaaagcctcgatccctacgcttcacctggagcatgaaaaccactagttcaatggatcccggggacatgatgcgggaaatccgcaaagtgttggacgccaataactgcgactatgagcagagggagcgcttcttgctcttctgcgtccc

SEQ ID NO: 35234 - DNA, 480 bp, Homo sapiens
aggagggggcgcccccttcgagatcatagaccacgtcggggaatttcccggctcctccaacttgtgggtgccctctgtctactgccagagccaggcctgcaccagtcactcccgcttcaaccccagcgagtcgtccacctactccaccaatgggcagaccttctccctgcagtatggcagtggcagcctcaccggcttctttggctatgacaccctgactgtccagagcatccaggtccccaaccaggagttcggcttgagtgagaatgagcctggtaccaacttcgtctatgcgcagtttgatggcatcatgggcctggcctaccctgctctgtccgtggatgaggccaccacagctatgcagggcatggtgcaggagggcgccctcaccagccccgtcttcagcgtctacctcagcaaccagcagggctccagcgggggagcggttgtctttgggggtgtggatagcagcctgtacac

SEQ ID NO: 35235 - DNA, 445 bp, Homo sapiens
  misc_feature (1)...(445): n = A,T,C or G
agggggntnnnnaatcgattgccatacttcgtgcggtggaattccattctgaaaaggtacagggtgtgtctagtcacaggagtcacctgcaaggctccaaactcaggctggatggccccttggggagtgaattctgcaagagttgcacctggggccaacagaaggagctggaatcactgattctgtatcctggctacatgccttagaccacaggaaccagactctgaagcaccacagatgtttctgtgaacatctggagttgggaatcactgagttagatcaagaatggattcggctgccatgctcgggttgagattgtattgacggatgaaggggaatgacggaagaattcctgcggtaaagtgctgtgaagacactcctgttttagaaagagctctctagccgcagcaaggaggattaactggaggcccaaggagtagtctgg

SEQ ID NO: 35236 - DNA, 507 bp, Homo sapiens
  misc_feature (1)...(507): n = A,T,C or G
aggccncnnnnnnnntttgtcgagcatcctagtccagtgtggaggaattcattttttccctgtcttcggcagaatcccaacccaggattatttgctgtaatgcatcctctgacctatgcagaaacgttgatagattaccatctatgctctcaccccaagtacaaattcaccaaagagtcccgccacgggtccagcattcctgtcacccaaaagcagtttctccatcacacggacattattcccggaataatgcactggaaaagcttccagtccctggttctctcctccctgccggacccctccaagatggagaccacaaagagctgcgattccttcaattcatttatgcttccgatagacgtccctgccatccttgatgccttaccagaagaggacagactataaacagtagaacgtgagctctgtgagcagaatgtagaagttatgttgactccagaaatgatcaaagaggaattccctatgttgaactacaaggacatcatgaag

SEQ ID NO: 35237 - DNA, 483 bp, Homo sapiens
  misc_feature (1)...(483): n = A,T,C or G
ccccgccccccccngcnattgaaaccactgatgacactaggcagngcggnggaattccagacttcggtggctcatcagatgaaaggaggtgcagagagagcctgaagttggctctgtgatcccgacttggctgtcactggcctgctgggtgtccctgggctacttccttcccctctctgggcctcaggacccatatgtgagctcccagggccagccctgtggacacttgtagagtctggggaaaggttccgggcataagtggggggcatgggaatcggcctcccctgctcctcatgttacttccttaagtcatcacaatagccctgaaaagcaaaggcctcatctccatggcacaggtgatgaaacaggaagactgaagcccaggcctggccggcccacggccacattcaggccaacagaccatccctccttccacagaggagaagcgcatctaccgggtgcctgttttcacagcgcccttct

SEQ ID NO: 35238 - DNA, 482 bp, Homo sapiens
  misc_feature (1)...(482): n = A,T,C or G
gagtnctnnnatcgatagcatacgctagtgtcgnggaattccccggctcgagcggccgctggtagtgtccagaagaatggacacctgctccagatttagatgcccatctgggcttttgtttgatttgcggcgttcctgtcttctgtaaagctagtgagttgtcccaagagactgatgccacagcttgttcgcagtttacacaaactcagctttaaaattccaaatagaatctgacttgcgaactctatctgcagcatgtggagcttctagatgtttactaccttgaatggttgtcagtgtcactgaaccacaggggagaggagtatggggtagagcaatggtctgggccaaggaatggtgagcttanggtcttcctctgactccttactcctcaaggaggcagttagggtccctcttaagcaggcttctatttcttaccactaaattggtttcctttttcatccagaagttagaactccccg

SEQ ID NO: 35239 - DNA, 425 bp, Homo sapiens
ggaggcccagtgctctggcctgagttgggttgtggccttaccccaggtgaagcaagagaaggcggatacccaggacgagtggacaccaggcacagctgtcctgacttctcccgtattggtgcctggctgccctagcaaggcagtagacccaggcctgccttctgtgaagcaagagccacctgacccagaggaggacaaggaggagaacaaggatgattctgcctccaaattggccccagaggaagaggcaggaggggctggcacacccgtgatcacggagattttcagcctgggtggaacccgcttccgagatacagcagtctggttgccaagtctgcagggcaggcactcgggaagggaagatggatgtaaagtgtgggagaccgaggacacagtggagcccacgagcacgagctggaacccac

SEQ ID NO: 35240 - DNA, 497 bp, Homo sapiens
  misc_feature (1)...(497): n = A,T,C or G
agcgnntcnntttgaatgagtaccttctgacanggcagncctacatgtatatatgtatatcgagagatatatacataggtatctgtatatatgcatatacatgcctatctatctttatctacatgtattacatagatggggtaattactgataaatcctttggacttctttgtaaatctctgggctaaagacccatccagtattatacgtgatctggtctatattgctcactcaccggttctcctcactatctagagaagattcacttagcaggcctccccttaaagaagggcaccttaactggactcactcctcccatagtagactgcacagtacacaagcagaagaggagagctcattaataaagtcaccatagaggataattcttaaatgaataaagacatcataacatccagtattggctagcacatatggctatcagcaagctcaccctacaaagaaatagtgagacaacagttcgaatattggccggttgn

SEQ ID NO: 35241 - DNA, 468 bp, Homo sapiens
  misc_feature (1)...(468): n = A,T,C or G
gtgcggtannnnnnnaatggagactttagtccagtgcggtggaattcgagttaccttgtaaatgagaagtcatgatagcactgaattttaactagttttgacttctaagtttggtactgtgaggcaagtacttaaaattttcatgctggttacttaaaaggcatttatagatttcaagaatgattttgtatacgatgttttaaattttgactgatctcatagtcttcatagaattgcagtagtcttcattgtatgaaatcccgaaagtccatgagttgatcttaaagaccactaacagactggctatcagatcccttttcactttggctatttttttcattttttgagatggagtcttgctgtgtcactgaggctggagtggcaatgcgcgatcttgctcactgcaacctctgcttccaggatcaagtgatcttcctgctcagcctctgagtactggattacagatgc

SEQ ID NO: 35242 - DNA, 476 bp, Homo sapiens
  misc_feature (1)...(476): n = A,T,C or G
aggcgttcccnnttagaaaccatagtagacactagtccagagcggaggaattcctcaccatggcacctttatggaggagttcaactccgggaagcagtttgttcgctatataaacatgttgataaacgacacgacgtttttgctcgatgaaagtctggagtctctgaagcgaatccatgaagtgcaggaagagatgaagaacaaagaacagtgggaccagttgccccgggatcagcagcaggctcgtcagtctcagcttgctcaggatgagcgtgtgtcccgctcttacctcgccctggccaccgaaaccgtggacatgttccacatcctcacgaagcaggtccagaagcccttcctcagaccggagcttggaccccgattggctgcaatgctgaactttaatcttcagcaactttgtggccccaagtgccgtgacctgaaagttgaaaaccctgagaaatacggctttgaaccaa

SEQ ID NO: 35243 - DNA, 463 bp, Homo sapiens
  misc_feature (1)...(463): n = A,T,C or G
natcgagaactgaaggccactgcggcgggcggnggaattctaggtagctatcacaggattgaaggagaagaacaaagntggggaaggctgatatcaactatatgacattctgggaaagtaaaaagctatgtagacagtaataagatcactagttgcgagaaggctgggggaagaagtggcgaatagacagagcagagaggactttgaaggcagtggaactattctatgtgatactataatggtggatacagctcattacacatttgtccaaacccgtaaaatgtacaatacaaaactgaactctaatgtaaactatagactttgggnaataatgatgtcattgtaggctctttgattgtaacaaatgtactactttggtaggggtattgataatgggggacagttatgcatgtgtggagaaaaggagtatctgggaaatcttggtacattcctctcaattttg

SEQ ID NO: 35244 - DNA, 463 bp, Homo sapiens
cctcgttgtcgatccctagtccgtgtggtggaattcgcctgcagctgtgtagtctttggaagaggtagcccctgaacgcagagcctaagagaagcaagtcggccctgacgccaggccccagtgggcgcctcacactcagaacctcataccccagagcaaaccgatggtcagggagagggctagagctcacacccagctcggaatagatcttccctgatgacatttcatgccctctaaggcagtttttaaatgaaggtacacacatccaggggtgttcacaggctttcacagcaagggtacctatttcatggcaaaataggcagttttaaaagaataaacaagctaggtgtggtggctcatgcctgtaatcctagcactttgggaagccaaagctgatggatcgcttgagcccaggagtttgagaccagcctgggcaacatggcaaaaccccatctctacaaaa

SEQ ID NO: 35245 - DNA, 461 bp, Homo sapiens
  misc_feature (1)...(461): n = A,T,C or G
ncttgagacctagaccaccgcggnggaattccttagtttttgatactaaagactagaccggagaaatgctttaacaaatcacaaaaatctaagaaaatagacagttaattatttttaaacagtggaagaatttcaatcataattaaagcagcttttgtattttttgatgtcatagcctatagtgaaatttcatatattctgtttgtagatacatgagttcctacgatatgcttgcacataatagaactaattactatttgttgagaacctaacctgtacctaatatacatgtagtttctaaatcaaacattttactttttttaaaaattgtaaaaagcccatagtaaattaatcatgtttaccatttaaaaatgtacagttcagtagtgttaaatacattcacattgttgcacaacagatctctagaacttttttgtcttgcagaactgaaattctgtacn

SEQ ID NO: 35246 - DNA, 480 bp, Homo sapiens
  misc_feature (1)...(480): n = A,T,C or G
gcccccccccccncnnnnnatcgtagatcatagatcaccgtggnggaattcgtttctgttagaggccaagtattattgacacaggattgcaaacacacaaacaattggaacagagcactctgaaaggccattttttaagcattttaaaatctattctctccccctttctccctggatgattcaggaagctgacattgtttcctcaaggcagaattttcctggttctgttttctcagccagttgctgtggaaggagaatgctttctttgtggcctcatctgtggtttcgtgtccctctgaaggaaactagtttccactgtgtaacaggcagacatgtaactatttaaagcacagttcagtcctaaaagggtctgggagaaccagatgatgtactaggtgaagcattgcattgtgggaatcacaaagcaaatagtactccagaaagacaaatatcagaagcttcctattctttttttttttt

SEQ ID NO: 35247 - DNA, 486 bp, Homo sapiens
  misc_feature (1)...(486): n = A,T,C or G
gggcnctnnaattgattgcgatctatagtccgngtcgtggaattccgactccttaacaggatctacgataaggtacaaaatgaggccaagacacccttgaagaagttcttgttgaagctggctgtttccagtagagtcggagagcttcaaaagggtatcatcaggcatgatagtttctgggacaagctcatctttgcaaagatccaggacagcctgggcggaagggttcgtgtaattgtcactggagctgcccccatgtccacttcagtcatgacattcttccgggcagcaatgggatgtcaggtgtatgaagcttatggtcaaacagaatgcacaggtggctgtacatttacattacctggggactggacatcangtcacgttggggtgcccctggcttgcaattacgtgaagctggaagatgtggctgacatgaactactttacagtgaataatgaaggagaggtctgcatcaagggtacaaan

SEQ ID NO: 35248 - DNA, 464 bp, Homo sapiens
cttagaaccccttcgtagacactagtcagtgcggaggaattcgacacgagtggccaggcccagccgcagccgcagcagcagccgccgcgtcggcacggtggagccagacacaaagagaggggctgtttgcggggtggggtggggggttcgctatgtcggatgacgattcgagggccagcaccagctcctcctcatcttcgtcttccaaccagcaaaccgagaaagaaacaaacacccccaagaagaaggagagtaaagtcagcatgagcaaaaactccaaactcctctccaccagcgccaagagaattcagaaggagctggcggacatcactttagaccctccacctaattgcagtgctggtcccaaaggcgataacatctatgaatggagatcaaccattctagggcctccaggatccgtgtatgagggtggtgtattctttctcgatatcacttttacacca

SEQ ID NO: 35249 - DNA, 462 bp, Homo sapiens
  misc_feature (1)...(462): n = A,T,C or G
catagagatcattagaccagcgctgnggaattctatgatagccgttagaagccttgttgatgctgatagattccgctgcttccatctggtgggggagaatagaactttctttggatgccggcactacacaacaggcctcaccctgatggacattctggacacagatggggacaagtggttagatgaactggattctgggctccaaggtcaaaaggctgagtttcaaattctggataatgtagactcaacgggagagttgatagtgagattacccaaagaaataacaatttcaggcagtttccagggcttccaccatcagaaaatcaagatatcggagaaccggatatcccagcagtatctggctacccttgaaaacaggaagctgaagagggaactacccttttcattccgatcaattaatacgagagaaaacctgtatctggtgacagaaactctggagaa

SEQ ID NO: 35250 - DNA, 465 bp, Homo sapiens
  misc_feature (1)...(465): n = A,T,C or G
ctcgagctcatgatgaccatcgcgnagngcggnggaattcctgtaatcccagcactttgggaggccgaggcaggcggatcacctgaaattaggagtttaagatcagcctggctaacatggcgaaaccccgtctctactaaaaatacaaaaattagcctggcgtggtggcgcatgcctgtaatcccagctactcaggaggctaaggcaggagaatcgcttgaacccgggaggtggaggttgccgtgagctgagattgcgtcactgaactccggcctgggtgacagaaggaggctctgccttaaaaaaaaaaaaaaaaacctcctgggactgttgcagggataaattaaaggattgaggtttggagggatggctgagctggacctccaggcgtcctatttttttaagggggggggtacggagtgggcccccctcctttttttttccaggcagggggggctgtggttn

SEQ ID NO: 35251 - DNA, 463 bp, Homo sapiens
  misc_feature (1)...(463): n = A,T,C or G
atcgaagacatagaccaccgtcgnggaattctcaagctgatgcttcattgaagacttaagtttacttgacataatagcatttgtgattgtcgagaacactttaggccatttgttacccatgaatcaacaaagaaactgacctttttggtaggaggaaacataagcactaaacactaagctgttgcaacagattgccttgtgctgtttgggcagaataaagacaagtgacttgagcggggtggtcagcagtgtacataatattccagtaggaaactgcttccaagtttaagcatgagctccccaaactggagaaaacatattttgctattctgagacaacaatcagaatacagactttggattccaggtcacagtttgctttttagacaaggtaaagcaaagaaagccacattgtgccatcttcagctccagtggctttagcagtgactgtttgacataaaacn

SEQ ID NO: 35252 - DNA, 452 bp, Homo sapiens
  misc_feature (1)...(452): n = A,T,C or G
natcgagattcgtagtccagtgcggnggaattcctcgtttttagtcatttaaaattgttttctaagtaattgctgcctctattatggcacttcaattttgcactgtcttttgagattcaagaaaaatttctattcttttttttgcatccaattgtgcctgaacttttaaaatatgtaaatgctgccatgttccaaacccatcgtcagtgtgtgtgtttagagctgtgcaccctagaaacaacatattgtcccatgagcaggtgcctgagacacagacccctttgcattcacagagaggtcattggttatagagacttgaattaataagtgacattatgccagtttctgttctctcacaggtgataaacaatgctttttgtgcactacatactcttcagtgtagagctcttgttttatgggaaaaggctcaaatgccaaattgtgtttgatgg

SEQ ID NO: 35253 - DNA, 492 bp, Homo sapiens
  misc_feature (1)...(492): n = A,T,C or G
ccgccgcccccccntnnnaatcgtagatcactagtccattcgagggcattcgacaagcagcccaagaaacaggagaaaaacccagtgttggtgtccccagagtttgtggatgaagctctgtgtgcgtgcgaggagtaccttagcaacttggcccacatggacatcgacaaggacctggaggccccgctgtacctcacccccgagggctggtccctcttcctccagcgctactaccaagtggtccacgaaggggcagaactcaggcacctcgacactcaggtccagcgctgtgaggacatcctgcagcagctgcaggccgtggtaccccagatagacatggaaggggatcgcaacatctggatcgtgaagccaggagccaagtcccgcggacgaggcatcatgtgcatggaccacctggaggagatgctgaagctggtgaacggcaaccccgtggtgatgaaggacggcaagtgggtggtgcagaagtatatt

SEQ ID NO: 35254 - DNA, 533 bp, Homo sapiens
  misc_feature (1)...(533): n = A,T,C or G
ggaccgttataactccgtgcaaatgcatctcgccaccgcaggtgaccgaattacaacatncccccccaccgggggnacnnnnnattgagatcgtaggncaatgcggaggacnncgccccggggccttttattggggagctaaggccagctgcgtgtctagttttgagtgctgtaaaatagaatcagcaaatcactcttatttttcatccttttccggtattttttgggttggttctgtgggagcagtgtacaccaactcttcctgtatattgcctttttgctggaaaatggtggatggtgaataaaattttctataaaaattataattcagtgagttacgtggaaggggaggaagatttctactctccctggaaacaggcctgggaaaccttggcatttgtaacaaggtttcactgagatgtacttttccttctaattccggtttgcgggggcaggggctcttggttctttttttttttttttttttttagcccctaactaggcccattttcctttaaaaaaagaaagggttn

SEQ ID NO: 35255 - DNA, 472 bp, Homo sapiens
  misc_feature (1)...(472): n = A,T,C or G
ntcganncccctnttcgagnacactagtccatgtggtggaattcctggagcccaagaaggagaaggaagaagaggagctgtttcccgagtcagagcggccagagatgctgagcgagcaggagcacatgagcatctcgggcagtagcgcccgacacatggtgatgcagaagctgctccgcaagcaggagtctacagtgatggttctgcgcaacatggtggaccccaaggacatcgatgatgacctggaaggggaggtgacagaggagtgtggcaagttcggggccgtgaaccgcgtcatcatctaccaagagaaacaaggcgaggaggaggatgcagaaatcattgtcaagatctttgtggagttttccatagcctctgagactcataaggccatccaggccctcaatggccgctggtttgctggccgcaaggtggtggctgaagtgtacgaccaggagcgttttgataacag

SEQ ID NO: 35256 - DNA, 427 bp, Homo sapiens
gaacggaaaatggcgcctcacggcccgggtagtcttacgaccctggtgccctgggctgccgccctgctcctcgctctgggcgtggaaagggctctggcgctacccgagatatgcacccaatgtccagggagcgtgcaaaatttgtcaaaagtggccttttattgtaaaacgacacgagagctaatgctgcatgcccgttgctgcctgaatcagaagggcaccatcttggggctggatctccagaactgttctctggaggaccctggtccaaactttcatcaggcacataccactgtcatcatagacctgcaagcaaaccccctcaaaggtgacttggccaacaccttccgtggctttactcagctccagactctgatactgccacaacatgtcaactgtcctggaggaattaatgcctggaatacta

SEQ ID NO: 35257 - DNA, 453 bp, Homo sapiens
  misc_feature (1)...(453): n = A,T,C or G
attggacatgatgaccctagccaagngcggnggaattcgtgatttatttcaagagcctttgaggggattcaggtgaaggaacccccatctgtgctggagagttggatactcctttaaatagcccccaccacagtcataacaataatgataatgctggattatttgttaagccaaggttgtctgcctcatatccatcatgctgtttgcaatattcttgctttcaatcaatttatactgagtgtaactttaggatttctgctattaaatgcatgctctctatcctgcttcagtttctggctttgctttgtctgtttcaaaatatgtagcttcctcttttgtacaacaaaaaactcattctcacttttactaaatatactgtaggagtcatcattgatgttatttttctcttatgtatctgtaaagatttttggcatatgaatgtaatattaaagt

SEQ ID NO: 35258 - DNA, 458 bp, Homo sapiens
  misc_feature (1)...(458): n = A,T,C or G
cttcgatgatcattcgtccagtgcggnggaattcgataagccaggcattgtgattccttggcttcaagtgccttctgtcttccccgaaggtccactgagatctacaatcccccctttcctctgatctcttgccatgtaagtaattttttaaaagatcagtacaagagctatattttttcctaagaaaaaatttcaacaggaatggggagtagccccgttttggggctgatctgtccagaatttggagtgaggaacaaatccattctcatctactttccacattttccctcttgtttgaggtcctgttccaaccttcatttctgaaactgttctagagcactttgtctttctcgtagttcataacttaccccttcagtctagaattagaattacattatctgttttactactttactagactgtaagctcctagaagataaggactagggagttcatct

SEQ ID NO: 35259 - DNA, 456 bp, Homo sapiens
  misc_feature (1)...(456): n = A,T,C or G
ttttgagatcctagggcactacaaagngcggnggaantcccggcccccaggccggaagttatgagatccgacactatggaccagccaagttggttttttcgtccgtggagtctatggactgggattcagccatccagacgggctttacgaaactgaacagctacattcaaggcaaaaacgagaaagagatgaaaataaagatgacagctccagtgacaagctacgtggagcctggttcaggtccttttagtgagtctaccattaccatttccctgtatattccctctgaacagcaatttgatccacccaggcctttagagtcagatgtcttcattgaagatagagccgaaatgactgtgtttgtacggtctttcgatggattttctagtgcccaaaagaatcaagaacaacttttgacattagcaagcattttaagggatgatggagaaagcttcg

SEQ ID NO: 35260 - DNA, 487 bp, Homo sapiens
  misc_feature (1)...(487): n = A,T,C or G
gcgtactnnnaatcgatatcctacgctagtgtcgnggaattctggaatacaagggcctcagggccggctaccactgcggctactgcgattccaaggagggcaaagcgtcctgcggcatgtgggcacattccatgacagtacaggattatcaggatctcatagaccgaggatggcgaagaagtggaaaatatgtgtacaaacctgtcatgaatcaaacatgttgtcctcagtacacaataaggtgccgacctttacaatttcagccttcaaaatctcacaagaaggttttgaaaaaaatgttgaaatttctggctaaaggggaggttcccaaaggaagttgtgaggatgagcccatggattccacaatggatgatgctgttgcgggtgactttgcattgataaataaactggatatacagtgtgatcttaaaacactcagtgatgacatcaaagagagtttagagagtgaaggaaaaaattcaaagaa

SEQ ID NO: 35261 - DNA, 508 bp, Homo sapiens
  misc_feature (1)...(508): n = A,T,C or G
agccnnnnnnnnnnnatttgtcgtacttcactagtccagcgtggtggaattcctttttatttcccatattcctggttattttcatcattgctttgaattgaatttttatatctatttttatatgtaactctttttttacctcatgtttttgtttgttttgcacatttctcataccacaggtattgaagcccctgggtgataatttgatggaggaaaacataaggcagtctgtaacaaactctatcaaagcaggcctgactgaccaggtgtctcatcatgccagattaaagacagactgacagttcatctcctcacggactccactctctttttttttcatgcttgctgtacaatgagaactcaaataaaaataaaccaaagtttacaatcaactgtagaagtagtttagtgtaactggcttcacagatggctgccacagagtgtgaagattgtttggtagttttaagcattcttttaatggctcctaagacatgcagatggactgagg

SEQ ID NO: 35262 - DNA, 456 bp, Homo sapiens
  misc_feature (1)...(456): n = A,T,C or G
accaatcagaggcttgacactcagctgtgatcgtttctccttcccatacctttctagcactgaccccaaaagcctcaatcacactcaacctaggacaggaacaggtggtaaagcacaaactcgggaccttagctggggctagaaacatgcccttggggcaggtgtgtcccatgctggtggctcttgcagcctactagccttcatcaggagggagtgagatggaggctctagtgtctgggccagtgtgtcatctcactcttgagagccaagcctttgctgaagttcactgtaagacgctcccctggagaggcacgcactggagtgagggagcgccctaaggctttggttggacatgcatgcttcctgaccctccgatgtgagaatgtggggtgtggagacaagagtgactccatcttggatggctgatatagttggctctgtgtccccatccaaatn

SEQ ID NO: 35263 - DNA, 453 bp, Homo sapiens
  misc_feature (1)...(453): n = A,T,C or G
attgaaaactgatgatctagcccgngcggnggaattccttttgaggtacatttctttaagcacaagagaagtagaaatggcctttgccttgtctccagtggtttgtccctctggtgcctcagcagataccagagcttattcttatgaccatttggaagtagtcctcaaagtaaagatcaagaaaaaattggattctttttccattttctcataatagtagcctagtcaacacaagactcccataaaatatgactcactattgggagccatactattttataagcttacttcctgctgacaaaactagctttcctcaaggaaatataaaggaggggaaagtcacatagtgttaggaaaacattcctgtgttttgaatacgatgaatccataggatagagaaaaatctgcttgttctattctgagagttctctgagatatcccttcactctgctt

SEQ ID NO: 35264 - DNA, 478 bp, Homo sapiens
  misc_feature (1)...(478): n = A,T,C or G
aagcgatgcnngcncatccgtgaacctaacgacatngcganggacntncttgncggnacagacgtgtgaggcccggattgtgtgtgctcgaggccaggaagaggattggtttttctgtacctgcttgggtgacaaacagtgatgaatagcacctcacagcaattaggatgactgtcatcaaagacacagaaaatagcaagtgtgagcgaggatgcagaaaccctcatgcacagctgctgggagtatgaaagggtgcaaccactgtggaaaacacgttggtagttccccaacaagtggaacaccatcaccatgtgacccagcaattccgccctgcgcatgtatccgaaatagctgaacacagactcaagcggatgtgcgtattcccacgtctatagcagcgttgttcccagtgaccaaatgtggaaacaggctgtgtctgttgatgggtgatagacaaacaaagtgtccgtacatacan

SEQ ID NO: 35265 - DNA, 478 bp, Homo sapiens
  misc_feature (1)...(478): n = A,T,C or G
agccggnnnnnnnncactgatgactgagagcnctagcacagngcggnggaanncatcacagctcaggccacctggagagactccctttttagacagaagccctggtgcagtgctgcctttgagagtaagctgaggcctgtcaggtttctaccagcccagttacagatgggctgctcagctcagagagaggggtggtgactcccctaggaacacacagctaagaagtggtcccttaaaagacagacccaggtctgcactctgacctggaagcagctccgggtaggtgatgggtaacattccttaaatggtgcatgtcactggcctttcagctgggagccaaccaggtaccccttgccaccggccaaccctggcccctggggattcccatgctgccgagtcactcctgtcacttaccctgacaggcctagactcccgaggcttcctctttggcccctccctggcccaggagcttggactg

SEQ ID NO: 35266 - DNA, 422 bp, Homo sapiens
  misc_feature (1)...(422): n = A,T,C or G
ctgcaaaccaggtgtttttttctgaggctgtgttgacagctgctaatgagtgtgttggtgttttgctcggcagcttggatcctagcatgactatacattgtgacatggtcattacatatggattagaccaactggagaattgccagacttgtggtaccaattatatcatctcagtcttgaatttactcacgctgattgttgaacagataaatacgaaactgccatcatcatttgtagaaaaactgtttataccatcatctaaactactattcttgcgttatcataaagaaaaagaggttgttgctgtagcccatgctgtttatcaagcaatgctcagcttgaagaatattcctgttttggagactgcctataagttaatattgggagaaatgacttgtgccctanacaacctcctgcacagt

SEQ ID NO: 35267 - DNA, 481 bp, Homo sapiens
  misc_feature (1)...(481): n = A,T,C or G
cgcccgccccnncnncaatagaaaccttttgagatcactagtccagngcggtggaattcaaaataatggcccggttggcccgggacgagtggaatgattaatgatgttttgcagcagttttctacgtctgaaattttttatgtctctggaacccagaatttgctaagagatggaggaacctcagaaaagctatgtgaacacaatggaccttgagagagatgaacctctcaaaagcaccggccctcagatttctgttagtgaattttcttgccactgctgctacgacatcctggttaaccccaccaccttgaactgtgggcacagcttctgccgtcactgccttgctttatggtgggcatcttcaaagaaaacagaatgtccagaatgcagagaaaaatgggaaggcttccccaaagtcagtattctcctcaggtggtcctgctcgtctatcactggagcagcagggaatctgaacacgacc

SEQ ID NO: 35268 - DNA, 478 bp, Homo sapiens
  misc_feature (1)...(478): n = A,T,C or G
agggagcggncccncccactgatnacctagataaccgtcgnggaanncgcccttagcactcttcctgccccgggccacgtttgtgagcagcgtgagacccgagagctctcggctgccagagggtagctcaggcctgtccagctacaccccgaagcactctgtggccttcagcaagtggcaagagcacgcgctggagcaggccccgagggaggcagagcccccgcccggggaggccatgctcacacccgccagtcagaatgacctctcggacttccgcagcgagccagccctgtatttctgagcccagcactgccaggaccaaggctgagcccagctgtgggagtcccggaagctgggcagtagccagggactactgcacccgcttctgccttgtttggcctgactgtatcccacccacccctcctggccctggaagcagctagggtgcctcctgccatcggggccaggtctgggtctc

SEQ ID NO: 35269 - DNA, 457 bp, Homo sapiens
catcgatgaccattcgtccagtgcggtggaattccgggtccctgttctttgcgccagcgggaaccactatctctgcactcctggggttttgttacatggctgctttcctcaaaatgagtgttagtgtcaatttcttcagacctttcaccaggtttttggtgccatttacccttcataggaagagaaataacttaacaattttgcagagatacatgtcttccaaaataccagctgttacttatcctaaaaatgagagtacacccccttctgaagagctagagttggataagtggaaaactaccatgaaatctagtgtgcaagaagaatgtgtttcaacaatctcaagcagtaaggatgaagatcctctagctgccaccagagagttcattgagatgtggagattgcttggcagagaagtaccagaacacatcactgaagaagagctcacaacccttat

SEQ ID NO: 35270 - DNA, 480 bp, Homo sapiens
  misc_feature (1)...(480): n = A,T,C or G
aggggatggggnccccccccctcgagaccatagatcagcgtcgnggaattctaccacctggccaagaggctcacggggatcacgtacgcgctgaggccagatcccctcatggtcctgatgagtgtggcgccatctgccttacagctccgtgtccgcagcctgcccggagaggacctgagggcccgtgttagctacaggctgctgggggtcatctcactgctgcacctggtgctgtccatggggctgcagctgtacggtttcaggcagcggcagcgagccaggaaggagtggaggctgcaccgcggcctgtctcaccgcagggcctccttggaggagagagccgtttccagaaaccccctgtgcaccctgtgcctggaggagcgcaggcacccaacagccacgccctgcggccacctgttctgctgggagtgcatcaccgcgtggtgcagcagcaaggcggagtgtcccctctgccgggag

SEQ ID NO: 35271 - DNA, 443 bp, Homo sapiens
  misc_feature (1)...(443): n = A,T,C or G
cgggggcnnnntttgctcgacgtcattagtccgtgcggtggaattcccagcgtctacgggagcgaatgctgaggtggcagcgcctagacagtccggccgcgacaggacgaactcccccactggaaaggattctgagagaaatgaagtcagccctcacaaatgaagttgactgcctgctggctttctgttgactggcccggagctgtactgcaagacccttgtgagcttacctagtctaagagtaggatgtctgctgaggtcatccatcctgctgaagaagcacttgatacaaatcagaaggagatgctgctctttttgtgccgggatgttgctatatatgtggatccacctaacgtgaaggaccttctggatattctactggaaagaggaaaactgtctgtcggagacttgactgaactgctctacaaagtgaggcgatttga

SEQ ID NO: 35272 - DNA, 446 bp, Homo sapiens
gtttttattttttatttatttttgagatggagtctctgttgcccaggctgcagtgcagtggtgccatctcagctcactgcaacctccacctcccaggttcaagcgattctcctgcctcagccacctgagtagctgggagtacaggcatgtggcaccatgcctggctaatttttgtatttttaatagagttgagatttcaccatgatggtcaggctggtctcgaactcctgacctcgtgatccgcccgcctcggccccccaaagtgctgggattaacgggtgtgagccacggcgcccagcccaggaagagtttttaaattagagctctgtttaattataccactgggaaatcatggttacgcttcaggcatattcttccccagagtactacttacattttaaatttcattttgtaaagctaaatgtcagcattccctttaaaagtgg

SEQ ID NO: 35273 - DNA, 404 bp, Homo sapiens
atctgagtcacttgcgggtggcctagtggaggagaaggtgggatcccatccagaacttctacccagcatagccccgtcgcagaatttagtctcaaaggaaacttcaaccacagcactgcaggcctctgttgccagaccagagctggaggtaaatgctgccataatctctggacaaagcactgagcccaaagagatagttgaaaagtccaaaatcccaggccgaagaaactcccgaactgaagagccaactgtggcctctgaaagtgtggaaaatggacatcgtaaacgatcttctcgacctgcttcagcctccagctctactaaagacataaccagtgcggtgcaatccaagcgaagaaaatccaagtaaacaagcaggactgcgacttgatacttggaaatgt

SEQ ID NO: 35274 - DNA, 468 bp, Homo sapiens
  misc_feature (1)...(468): n = A,T,C or G
cactgggcnncccatgagtnatctaggaagngcggcggaaattgaacaggtgcatggttcatccgaggctttttggattctggtggaggatgtggacagttaggtgattctgcaccatgagtattttctcctcaaggccaagtacgcccaggacgagcacctcattacattcttcgtgcctgtctttgaaccgctgccccctcagtacttcatccgagtggtgtctgaccgctggctctcttgtgagacccagctgcctgtctccttccggcacctgatcttgccggagaagtacccccctccaaccgaacttttggacctgcagcccttgcccgtgtctgctctgagaaacagtgcctttgagagtctttaccaagataaatttcctttcttcaatcccatccagacccaggtgtttaacactgtatacaacagtgacgacaacgtgtttgtgggggcccccacggg

SEQ ID NO: 35275 - DNA, 422 bp, Homo sapiens
  misc_feature (1)...(422): n = A,T,C or G
ccagcattgcagcagctccaccatggcctgggctcctctgctcctcaccctcctcagtctcctcacagggtccctctcccagcctgaactgactcaaccatcttctgcatcagcctccctgggagcctcggtcacactcatttgcaccctaaataccgactactacagtacttataaagtggactggttccaacagagaccaggaaagggcccccgctttgtgatgcgagtgggcactggtggagttgcgggatccaagggggacgacatcccagatcgcttctcagtctggggctcaggcctgaatcgctacctgaccatcaacaacatccaggaggaagatgaggccgactaccactgtgggacagaccatggagatgagaccaacttcgttgtggtattcggcggagggaccagactgn

SEQ ID NO: 35276 - DNA, 488 bp, Homo sapiens
  misc_feature (1)...(488): n = A,T,C or G
agggncnnnttgcctgagtacactagggagtgaggtggaattccgacagctaccttgtgttgcagcaaagatctaccgaaatctctacagagaaggcagcggtattggggccattgactctaacctggactggtctcacaatttcaccaacatgttaggctatactgatcatcagttcactgagctcacgcgcctgtacctcaccatccacagtgaccatgagggtggcaatgtaagtgcccataccagccatttggtgggcagtgccctttccgacccttacctgtcctttgcagcagccatgaacgggctggcagggcctctccatggactggcaaatcaagaagtgcttgtctggctaacacagctgcagaaggaaagttgcaaagatgtgtcagatgagaagtacgagactacatctggaaacacactcactcanngacggttgtncangctatgggcatgcagactaaagagactgatncgcc

SEQ ID NO: 35277 - DNA, 386 bp, Homo sapiens
  misc_feature (1)...(386): n = A,T,C or G
ctcatcttcggacgacagactggaaacatcatcccagggaagaaaaacggatcctggctccgacatggggcaaaaaggagggaccaactgacgtaatgcagccctgaaaagcaacgaagagtataacaggaaaggggcagaaggagaggcgttacttcctggagacttcaggtgtggtagccggcgccgcgcccatagccggacggggatctgagctggcaggatgaatgtgggggtggcacacagcgaagtaaaccccaacacccgagtgatgaatagccgaggcatctggctggcctacatcatcttggtaggattgctgcatatggttctactcagcatccccttcttcagcattcctgttgtctggaccctgaccaacgtcn

SEQ ID NO: 35278 - DNA, 457 bp, Homo sapiens
  misc_feature (1)...(457): n = A,T,C or G
natcgatgatcattaggccagngcggnggaattcgtggctgacatgaactactttacagtgaataatgaaggagaggtctgcatcaagggtacaaacgtgttcaaagcatacctgaaggaccctgagaagacacaggaagccctggacagtgatggctggcttcacacaggagacattggtcgctggctcccgaatggaactctgaagatcatcgaccgtaaaaagaacattttcaagctggcccaaggagaatacattgcaccagagaagatagaaaatatctacaacaggagtcaaccagtgttacaaatttttgtacacggggagagcttacggtcatccttagtaggagtggtggttcctgacacagatgtacttccctcatttgcagccaagcttggggtgaagggctcctttgaggaactgtgccaaaaccaagttgtaagggaagccatn

SEQ ID NO: 35279 - DNA, 457 bp, Homo sapiens
ggcttttatttgtggttcaagcctcattcagcataaaagaattcacacaggtgagaaaccctatgaatgtcaagaatgtgggaaggcctttactcgagtcaattaccttactcagcatcagaagatccacaccggtgagaagcctcacgaatgtaaggagtgtgggaaggcctttcgctggggttcgagcctcgttaagcacgagaggatacatacgggcgagaagccgtacaagtgcacagaatgtgggaaggccttcaattgtggctatcacctcactcagcacgagagaatccacacaggcgaaaccccgtataaatgtaaggagtgtgggaaggctttcatttatggatcgagcctcgtgaaacatgagagaattcataccggggtgaaaccctatgggtgtacagaatgtgggaagagctttagtcacggccatcagcttacacaacatcaa

SEQ ID NO: 35280 - DNA, 504 bp, Homo sapiens
  misc_feature (1)...(504): n = A,T,C or G
agcnnnncnnnnnnnattgatttcactacttagtgtggtggaattccggcggcaggggcgctctgggttctcgatgcgtgcaggcttttcgggcccgcaactggtgggttgccagcgttgatgtggtggagaatgaagaggccagcgctagcatcattgttaaaatgacagactcgttcactgagcaggctgaccaggtgactgctgaggttggaaagctcttgggtgaagagaaggtggatgcaattctttgcgttgctggaggatgggccgggggcaatgccaaatccaagtctctctttaagaactgtgacctgatgtggaagcagagcatatggacatcaaccatctccagccatctggctaccaagcatctcaaggaaggaggcctcctgaccttggctggcgcaaaggctgccctggatgggactcctggtatgatcgggtacggcatggcccagggtgctgttcaccagctctgccagagcctggctgggaagacag

SEQ ID NO: 35281 - DNA, 456 bp, Homo sapiens
  misc_feature (1)...(456): n = A,T,C or G
ggggcttttccatttaacacatggagcccttcccccagaaggctacttccttgttttagaggaaggtactgcccattgggagatggggacattgggacctcagcaatgaagaacccttgtgaagtaaccaggaggaatggggaaagaagcaagttgggcaggatatggcctacttccataggcttttcttttttcaggtttgatgtaagcatgggcttacatcccccaggtacatacttttacttattgtgggataacctggcactagtaggcaggtaaagtcacaaatttggtgtcttttcaccttttgactgttgacttaatagctcctctcactctgcctggagatacttcctgcctcagatgaggagccagaagaaacagagcccgacttgaatgaactcagctcagagttgtaaggaccagcattctgtgggccattctctctacaggcan

SEQ ID NO: 35282 - DNA, 498 bp, Homo sapiens
  misc_feature (1)...(498): n = A,T,C or G
agcnnntcnnnnnaattgtgatcatctccaggggggaattcagccgggtgacctctcagtgagagatgctgccgtcgacactctgtttggagacttgaaggaggacaaagtgacgcgtcatgatggagccagctcagacgggcacctggcacacatcttcagacatgcggccaaggagctgttcaacgaggatgtggaggaggtcacttaccgagccctgagaaacaaagacttccaagaggtcacccttgagaagaacggagaggtggtgttacgctttgctgcagcctatggctttcgaaacatccagaacatgatcctgaagcttaagaagggcaagttcccattccactttgtggaggtcctcgcctgtgctggaggatgcttaaatggcagaggccaagcccagactccagacggacatgcggataaggccctgctgcggcagatggaaggcatttacgctgacatccctgtgcggcgtccggagtccagtgc

SEQ ID NO: 35283 - DNA, 482 bp, Homo sapiens
  misc_feature (1)...(482): n = A,T,C or G
agcgnntnnnntttgtcgacatcactagtccgtgtggtggaattccagcaccaccaatatccaatgcaagaacggcaagatgaactgccatgagggtgtagtgaaggtcacagattgcagggacacaggaagttccagggcacccaactgcagatatcgggccatagcgagcactagacgtgttgtcattgcctgtgagggtaacccacaggtgcctgtgcactttgacggttagatgccaccatgtagggattatcgcgagtggttgaccttacacttactccttaaatagcagtgagtaatgcatttgagctgtcccaggctctgtctcctcagctcatttcttactctttttctctacataactcattctattaaatacattgcaccaaagagatatggagacataaacctgtaatgaatgaggctgggcttttctgtaataagcttccttttataatactggtcagcttagctctctc

SEQ ID NO: 35284 - DNA, 456 bp, Homo sapiens
  misc_feature (1)...(456): n = A,T,C or G
attggagattcgatagccatcgcggnggacttcgntttactaacatacatattaaatcaaagtatattcttaaaagtacttgtgaagtattatctttcttgtgcattttcaatacttgtaaactggaaatcagaaaatatttactatgaacaggaaaatctgacatatagccctttttgatatgtttattaataatgattcttaatggggctcataataagtttaatatgcacagcatcttagaaaagtttaacctgcaaacacttttaaaacataatgcctacttgatttatatctataaaaagactgacaggtaattatatttggaaaacatttaatgcactaactttaaagaaattgaaaattcaggtggataaatagtcttacaaaagacaatgtgctttatgttatacctatagctttggtcccatctttaattgagaaacatttatctgt

SEQ ID NO: 35285 - DNA, 458 bp, Homo sapiens
  misc_feature (1)...(458): n = A,T,C or G
nattgagtaccgtagactctcgcanagngcggnggaattccagggagccgagatggcgccattgcgctccagcctgggcaacgagagtgttactctttcgcaaaaaaaataaataataaaatagagaccctaggagtcttccatcttaaacctagccctacaggtgaccgaatgcagctggagaataactgcttgttaagaggcagcaaaaccttgggttttgttgggaacatcatctctcactactttgatctcttggccatatgacagactaatcattagtgtcgcatttattcttccagtggtcagatggggtgctcacatgctgcaggttccttacatgtgcttgtttccttccctaaactgaaggtgcctttgaaggcagtctttttctacatccatcaagttctttggggaagagcacttcttagctattccatcaacactcttgccagtcn

SEQ ID NO: 35286 - DNA, 491 bp, Homo sapiens
  misc_feature (1)...(491): n = A,T,C or G
nttcgatgaacactcgttcagngtcgngcaattcccattaactgactcttccttccacgaaagatttcagtgtaccatgcgatactgtttgataagcattttacccatagtagaacttctttcaaaattggagtcagtcctctcacaccctgccactgttttactatgtttatcaatattctaaatcctttgttgtaggctaaacaatattcacagcattttcaccaggagtaaatttcatctcacaaaaccactttccaggctctttctggactgtagagttctttccaggctaccttgtggcagtttaagagtctggcatcattttccgctgggacctaaggatcgaggaggtgcttgtgactagactgccaatggacccatcacaaagtttaacccaaccttgatccccgagtcttcacaaatgctcactgaagaaaattcctggaacaattcagggtcctttcataacctctactctgaggtgtaat

SEQ ID NO: 35287 - DNA, 457 bp, Homo sapiens
  misc_feature (1)...(457): n = A,T,C or G
ggtggctacggacgccggagccgcagccctaggcggcgtcgccgcagccgatcccggagtcggagccgttccaggtctcgcagccgatctcgctacagccgctcgaagtctcggtcccgcactcgttctcgatctcggtcgacctccaagtccagatccgcacgaaggtccaagtccaagtcctcgtcggtctccagatctcgttcgcggtccaggtcccggtctcggtccaggagtcctcccccagtgtccaagagggaatccaaatccaggtcgcgatcgaagagtccccccaagtctcctgaagaggaaggagcggtgtcctcttaagaaaatgctgcggtctcctgtttgataaaagaatattggccagtattgcagattttaactgatttggctgatcctccagggaccacgttctgtgggcgtgtatnggagcagatgtatcggcaagcan

SEQ ID NO: 35288 - DNA, 391 bp, Homo sapiens
  misc_feature (1)...(391): n = A,T,C or G
cactggcctccagaagggcagctccacagggcagggcctcattatttttcactgccccagacacagtgcccaacaccccgtcgtataccctggatgaacgaattaattacctggcaccacctcgtctgggctccctgcgcctgacattcacacagagaggcagagtcccgtgcccattaggtctggcatgccccctcctgcaaggggctcaaccccctaccccgacccctccacgtatctttcctaggcagatcacgttgcaatggctcaaacaacattccaccccagcaggacagtgaccccagtcccagctaactctgacctgggagccctcaggcacctgcacttacaggccttgctcacagctgattgggcacctgaccacacgccn

SEQ ID NO: 35289 - DNA, 480 bp, Homo sapiens
  misc_feature (1)...(480): n = A,T,C or G
gttcagggggcccgccaatgatnanccttganaagcctggcggaanncgcnncnaggaaagcctgaatggtggccaaggaccacctgggctcccaaggagtggagggaggagggattcagttccacaggaaataaatgggaacagcccggtggagaagacaatgacaactgcaggacaacacctcaaccactccagaaaacagcccttgctcctccttctggccttttcatatttccaagttactgttttaaaggaaaaaaaaaaatgagggtgtggctgtttattctctaatgtgacaaaaacatgaccatccgggaggagaggggctaacggtgcaaccaactgaggctgaaacacagattcagctgaaatgcagcttctgcagagcgggggccggcttccctcctagcccttcagctgctcaccctgtccctgcagctctgaaaaacgcccttccagtaagcgagcaaggagcacac

SEQ ID NO: 35290 - DNA, 466 bp, Homo sapiens
  misc_feature (1)...(466): n = A,T,C or G
natcgagaccantgtcgaagnccngtaattccgggctcggtcctgacaagctgctgctctgtgggccaagcttccccttagaagctctgagtacctctgagcctgtgggaaaggtcacagtaagagttctgtgcaaccaccgtcggtaaaacctttggagaggcagatgtcgactataagctcccacctcagagagcaggatgaacctacccagatgtttcccaggccaggcctttaggcctctggaaaacagctgctgccgcaaacacagctccacagcctgctgttgcctcgtgctaaacccagcactagccactggggagcagcctgtcgctgtcccacaggcctgcgctagcttccagggaattcttggagctgtactaatactgcagaaaaactagtttagccttggctttcagaagatgccagtgacaatggagtacattgccctaaagcagtattttca

SEQ ID NO: 35291 - DNA, 477 bp, Homo sapiens
  misc_feature (1)...(477): n = A,T,C or G
agacgtcccgcnattgaaaccactgatgaccattaggccagagcggnggaattcgcttcatctctccgagcctcggttttctcatctccagccctaaaatgacgacacgctccacaggtcttgggaggattaagtgaggggacatgagcctggaagctccgaccccaggagccagcccatcaacctgaaccattacgccaccaagaagagcgtggcggagagcatgctggacgtggccctgttcatgtccaacgccatgcggctgaaggcggtgctggagcagggaccatcctctcactactacaccaccctggtcaccctcatcagcctctctctgctcctgcaggtggtcatcggtgtcctgctcgtggtcattgcacggctgaacctgaatgaggtagaaaagcagtggcgactcaaccagctcaacaacgcagccaccatcttggtcttcttcactgtggtcatcaatgtttt

SEQ ID NO: 35292 - DNA, 469 bp, Homo sapiens
  misc_feature (1)...(469): n = A,T,C or G
aatagagaccccattacgagaccntgngaangncgcggaanncctctcctaattacccttttagatccaggtgaacactactgctaaccttcatgccgatttcataccttatgctacacagacattaagaagagcagagctggcaccctgtcatcaccagtggccttggtccttaatcccagtacgatttgcaggtctggtttatataagaccactacagtctggctaggttaaaggccagaggctatggaacttaacactccccattggagcaagcttgccctagagatggcaggatcatgggagcatgcttaccttctgctgtttgttccaggctcacctttagaacaggagacttgagcttgacctaaggatatgcattaaccactctacagactcccactcagtactgtacagggtggctgtggtcctagaagttcagtttttactgaggaaatatttccattan

SEQ ID NO: 35293 - DNA, 452 bp, Homo sapiens
  misc_feature (1)...(452): n = A,T,C or G
nttgagatcgttggccatgcggnggaattcctcctcctctcccagttctcaacttctccatgcctggaatccacgggtgaagagagtcggtagatctcataagaaagaatccagtctgacttccctctggagaatgactatggacagaaggccaccatcctccacagagcaccctgtcctgagtaggggttgtgctcattaccccaggccagtggtagcttcctcaggagcctggccacttccaacggtagcactgaagtcatgcaaatgcatagtcaggtagattcagaccttgtccacaccttcctgggcaacccccaccatgaacctgtcagcctctttcccatagctaatagacatttcccaggccttgaggggccccaccctgtctctttcatcaaacctgatggtccaggctgggcatccctctcctcctccatccccagacatca

SEQ ID NO: 35294 - DNA, 455 bp, Homo sapiens
  misc_feature (1)...(455): n = A,T,C or G
gatgtagctttgggatcaggtgccactggggtctttaccaattcatcctggctctggaacaaactcttcgaggccagcattgaaacaggggaccgtgtctggaggatgcctctcttcgaacattatacaagacaggttgtagattgccagcttgctgatgttaacaacattggaaaatacagatctgcaggagcatgtacagctgcagcattcctgaaagaattcgtaactcatcctaagtgggcacatttagacatagcaggcgtgatgaccaacaaagatgaagttccctatctacggaaaggcatgactgggaggcccacaaggactctcattgagttcttacttcgtttcagtcaagacaatgcttagttcagatactcaaaaatgtcttcactctgtcttatattggacagntgaacttaaaaggtttttgaataaatggatgaaaatcn

SEQ ID NO: 35295 - DNA, 456 bp, Homo sapiens
agtaaccagaaccacaggtgctcaccaccatgcccagctgactttttgtattttttgtagagatggggtttacccatgttgctcaggctggtctcaaattttcgagctcaagtgatccgcccgccttggcctcccaaaaggcatgagccactgcgcctgacctacgatttctttctttatatatcagtatgaacgcaagggctgtttgttggattctgtgagtcataatctgatactgtttccacgctttggccattgggagctcctggagattgtctcctgtgccctatccttatttaagcacttgtttattttgggatgtcttcagttttccttgtcccagctctgcacccagctgcttctccagggagccctccctcactggagactgggatttagcaaccaagacctgggcactggctgtgcttgttgcttctgggccctcctgggacagag

SEQ ID NO: 35296 - DNA, 456 bp, Homo sapiens
  misc_feature (1)...(456): n = A,T,C or G
gacttctgtttaacttaaaattagtcgtattttaatggcttgggatttggtgcaaacaaacatgattgatagctggacagacatgctcgtcatgaaaaaagaaccatttctgaagcccgattggggccaaacatttacaccttgcttcatagtaaccagttgagatgaagcacgtcgttagaacgttgttggacaccatgttgaattattcccccatcggttgtgaagaactgtgctacattcaggcttacccattgaactcagtatatatatttttttccttcctgtcttttgtctggcaggataccattcttgttgctcttctgtgtaatgaagtttaaatgcttgtttggaaaactttatttaacagtttaaaaggcttgatagaaagagtgcattagtctgaagagtatacattggataggaaagaatttccttcttttgtttctcccaatn

SEQ ID NO: 35297 - DNA, 395 bp, Homo sapiens
  misc_feature (1)...(395): n = A,T,C or G
cccggctccacactccagctaccagagaagcctctggaacaaacatggaatatccttacccccttcaccaagaccctacctgtctccaatctcagcagaaaagtaacaagctgggccggggtggggatcccggtgacatgtctaccagaggcaggaagcggaggggagaggagagcagagtgtgggctgggggtcccaaccactaggggaccccccagaagtcagcatcattcgggagcctgaggcgctgggaattccaaggcctggccagaaagccccagtctaagggacgcatcccagtccccagggagccccaatctaagggatacagccccatcctcagggagccccagtctgagggagacacagactcgtnctcacggaggcccagtctn

SEQ ID NO: 35298 - DNA, 492 bp, Homo sapiens
  misc_feature (1)...(492): n = A,T,C or G
attcgtgaacactcgttcagngaggtggaattcgcttctccctctaggagcctagagaaccctcctgggctgcagctcagccttctctcacctactatgtctgtccaacaggtctgcatgggtccctgataatgagaacagctggctgggcttctctcccagtctgcctagcccagccctgggactggaatttgagtaagggacgaggggaaattgcaatttcattccttaacttccttttccccacccatgctgttcaacctctttatcatatctgaggctggaggtgttgggcaaagcaacatccccattccaattccattttctgatgcagattctatctgagggatttggaagccatttggggaggcaggctgtgccatagggtacagctgggtaataaatgtctattctcctggggaggagggagtctaaactttccttccgtgctcaatatgtacctccatagaccggccagaatttagctacaat

SEQ ID NO: 35299 - DNA, 490 bp, Homo sapiens
  misc_feature (1)...(490): n = A,T,C or G
nttgtcgacgaccctaggccangnggnggaattcgatactggaagacattccagagcatgaggaagactatcttgactcaactctggaagatgaagaaattattattgcagagtacctatcctatggagaaaataggaagtcagcgacaaagaaaaactaaataatgaacagaaatagcgctaattttctgcttataaatgctatcattatgaaaaggctaatgcagctctttctgttcttactttttatctgaattacaagtcctctttgggtgtaggagggggtgggcaggggacaagtccaggaggggtcccagggccttcatgcgtggtctcggggaagaagcttcctctggcctggcgcaggccgttccatctgcctcccaggtctgcgtccctaaccccttccccagcttggtgtttaccccgaaacaggaaggaacaggggtcctgtagaacaggggtcctgggggaggtgtccagggcacgn

SEQ ID NO: 35300 - DNA, 490 bp, Homo sapiens
  misc_feature (1)...(490): n = A,T,C or G
agagcccnnagcnnccccccctgatnaccctgcgatggaacgcccatatcagcgcggacagaatgtttcacaattcccaggtaaactctggaccattccaagtgtcctagccttctgatgacattaattacctagttgtgtggaggagtataggatggactctcctgagaaggggaggttggtggctttgtcttttctttttgctggatcctgaactggtctagacctcctgcccccaccccccagcccccatcagatgtggctggcctttcatttgaaggcttcagacttaaagcattaagcagctagtgccctctgcagggcctggcttccccagggaagggcagcaaggaacatgggaccagaagcctgtcctcagtaatgcgactatagtgagctttagcacaagcttttctatataatgacatcttacttatcttttaccctttcctcagatttcccctgcctttaactaataaagaattgcgag

SEQ ID NO: 35301 - DNA, 459 bp, Homo sapiens
  misc_feature (1)...(459): n = A,T,C or G
nttcgatgactattagtccagtgcggtggaattcgaaaaccagtgctgagaagagagaaatagaggaaaagttgcacaaactcttcagccaagaccacctagtgatatataagggatatgttgatgatcctcgaaacactgataatgcatggatggagacagaagctgtgaactaccatgacgaaacaggtgagataatggataatcttatgctagaagctggagatgatgctggaaaagtgaaatgggtggacatcaatgataaactgaagctttatgccagtcactctcaattcatcaaacttgtggctgagaaacgagatgcacactggagcgaggactctgaagctgactgccatgcgttgtagctgatggtctccgtgtaagccaaaggcccacagaggagcatatactgaaaagaaggcagtatcacagaatttatactataaaaagggcagg

SEQ ID NO: 35302 - DNA, 461 bp, Homo sapiens
  misc_feature (1)...(461): n = A,T,C or G
ntttgatcgacgntccattagtccagtgcggtggaattccgagaagctccgaggatggctgaagtccaacgtctctgatgcggtggctcatagcacccgtatcatttatggaggctctgtgactggggcaacctgcaaggagctggccagccagcctgaagtggatggctttcttgtgggtggtgcttccctcaagcccgaattcgtggacatcatcaatgccaaacaatgagccccatccatcttgcctacccttcctgccgagccagggactaagcagcccagaagcccagtaactgccctttccctgcatatgcttctgatggtgtcatctgctccttgctgtggcctcatccaaactgtatcttcctttactgtatatatcttcaccctgtaatggttgggaccaggccaatcccttctccacttactataatagggggaactatacgtcaccaagg

SEQ ID NO: 35303 - DNA, 452 bp, Homo sapiens
  misc_feature (1)...(452): n = A,T,C or G
natgagatcgtaggcattgcggnggacttngngagatgggaagaagatcttctttgccatcctttgaaacactggactatggggattaagaggacattgaaactcagctgtcatccagcggcaaggaattgggggatgtcagtgcccgggaggacagaggaggccacagtgatgacctgtacgctgcgccacacagaaatcaggtgccattgttacatgaggtgaacagtgaagacgatgaaaatatttctcatcaagatgggtttgcaggctcccctcctgcaccacagcggacacaacaaaaagatggtacacaccctgttctgaatttaaaggatgaaaaacctccattatgtgagaaacctccaccctccccagatataactggtagagcacgtcagagatatacagaaataaccagagaaaagtttgaggcattaaaagaagacaat

SEQ ID NO: 35304 - DNA, 449 bp, Homo sapiens
gcaacttctgctcacatcctggaagaggcagggaagatggatggtggtgcactggacaacatctgccgctgcagtggtagcccctccacccttcagtgtaacctgagaagtgtggtgctggcggcctgctccagccctgcttgagcagggaggaggaggcagggtgggggctgtagctctgccagcggagtggggctggacctgttccttggcgtgtgcctggatgtgatttgcttccctcagtaccagaccgcaggcttcgtgtgaattgacagaaaataagaaaccaccagcagaaagcatcttgtctggctcttttccagacatcgtccttgtgagcccagtggggctctgacatcctgctgttttgtggatttgaagaagaaaagtcagggcataccctgccttgttccagaaagaatttaggggctctttggaacgatgcacac

SEQ ID NO: 35305 - DNA, 455 bp, Homo sapiens
  misc_feature (1)...(455): n = A,T,C or G
atcgtgactttcgtccatgcggnggaattccccggctgcatttgggggcccgtgctctggcttatggtgagaagaatttgacctttgaaggaccactgcctgagaagatagaactcttggctcacaaggggctgctcaatctcacatattaccagcaaatccaggtgcagaaaaaggacaacaagatatttgagatctcctgttgcagtgaccatcgatgcaagtggcttccagcttctatgaacaccgtctccacccagtccctgaccctggcgatcgattcttgtcatggcactgtggttgctctccgctatgcttggaccacgtggccttgtgaatataagcagtgtcccctataccaccccagtagtgccctgccagcccctcccttcattgctttcattacagaccagggtcctggacatcagagcaatgttgctaaatgactgtttcan

SEQ ID NO: 35306 - DNA, 421 bp, Homo sapiens
cagaagtgctggtctcggtcgggattccgggcttggtcccaccgaggcggcgactgcggtaggagggaagaggttttggacgcgctggcctcccgccgctgtgcattgcagcattatttcagttcaaaatgaactatatgcctggcaccgccagcctcatcgaggacattgacaaaaagcacttggttctgcttcgagatggaaggacacttataggctttttaagaagcattgatcaatttgcaaacttagtgctacatcagactgtggagcgtattcatgtgggcaaaaaatacggtgatattcctcgagggatttttgtggtcagaggagaaaatgtggtcctactaggagaaatagacttggaaaaggagagtgacacacccctccagcaagtatccattgaagaaattctagaaga

SEQ ID NO: 35307 - DNA, 488 bp, Homo sapiens
  misc_feature (1)...(488): n = A,T,C or G
aggnnttnnnatcgtgatcatacttagtgtggtggaattccagagttactggggcccagactgatcttgcttccttggcctttatccccttggctttcctagacactgccttgtgctggtggatatttattagcctgactcaaacaatgaagctattaaaacttcggaggaacattgtaaaactctctttgtatcggcatttcaccaacacgcttattttggcagtggcagcatccattgtgtttatcatctggacaaccatgaagttcagaatagtgacatgtcagtcggactggcgggagctgtgggtagacgatgccatctggcgcttgctgttctccatgatcctctttgtcatcatggttctctggcgaccatctgcaaacaaccagaggtttgccttttcaccattgtctgaggaagaggaggaggatgaacaaaaggagcctatgctgaaagaaagctttgaaggaatgaaaatgagaagt

SEQ ID NO: 35308 - DNA, 447 bp, Homo sapiens
ctcgactcagctgctgcagactgtggccatgaaggaggatgggcctaacgttggctggtattctaatattttcacaagacatgtaaagcttttttaaaaaaatacatgtggccgttaaatcgatcaatttttaaattttggtaacattcaggtttttaaaaaacagtctgtttagctgtcaaaaagaaaaaaacatgagttcatctagaaacctccaactccagtccagtctaactctccttgtttcttctttctcctgtagtgaaaaaccttgctcttgttgtctacaatatgtttacttatctgttccatcctagtatacaagtaaaattgtatttgcataactttagtatatttcctctaaatatttagtacttacaaagaggaaatattggagccgtaagtaatatttagagccataagtctaggcctggtgtggtagctcgt

SEQ ID NO: 35309 - DNA, 472 bp, Homo sapiens
  misc_feature (1)...(472): n = A,T,C or G
gggcaggggnccccccttcgtagtcatagacnagcgtcgggaattcccttgacgatcctttagctagatgaccactccagacacgctcaagaaccaagtatgtgccatatacatggacacacctttgaagactgcactgtccctagtgccttacttgatcctgatcagagccactccaaccgatgtgtaacaaaaagaagagggcatagattttttatggctgattaagtgcattatgattacatgaaataaacattctttcacatggctactgggaatataaatttcgctccagaaaggccgtagcagtttgacgataggtggcaaaaccttaagattgtgtactggggcccagaatttttatttctaggaatgtatcctgaggaaattatccgagatccccacaaactgcaatgttttagaattgtccttatagcattgcatacacaagaaaaacagagaaaagcctgat

SEQ ID NO: 35310 - DNA, 265 bp, Homo sapiens
cgacggaacaagcatcatgctattgggttcaagaaagaagtttgtagagggggtcgacagtgactaccatgacgaaaacatgtactacagccagtcttctatgtttccacatcggtcagaaaaagatatgctggcatcaccatctacatcaggtcagctgtctcagtttggggcaagtttatacgggcaacaaagtgcactaaggcttccaatgagggggatgagcaacaatacccctcagttaaatcgcagcttatcacaaggg

SEQ ID NO: 35311 - DNA, 476 bp, Homo sapiens
  misc_feature (1)...(476): n = A,T,C or G
cccccgcccccccctttgaaaccctgattacactagnacagngcggtggaattcgttttcttatgcagctttcagcgattccaacatcataacagcggcggttgacactgctctctatattgctaagcaaaatagccctgttgtggaagtgtgggataagaaaactgaaaaactctgtggactaatagactgcgtgcactttttaagggaggtaacggtaaaagaaaacaaggaatcaaaacacaaaatgtcttattctgggagagtgaaaaccctctgccttcagaagaacactgctctttggataggaactggaggaggccatattttactcctggatctttcaactcgtcgacttatacgtgtaatttacaacttttgtaattcggtcagagtcatgatgacagcacagctaggaagccttaaaaatgtcatgctggtattgggctacaaccggaaaaatactgaaggtacac

SEQ ID NO: 35312 - DNA, 545 bp, Homo sapiens
  misc_feature (1)...(545): n = A,T,C or G
ccccagtcggcgtcacaatgccggtagcgacaccgagtgtatactagcatggcaatatccagataaaacncccggagagcacggnnnnnnttttgagatcgtggacactagcccangcggnggaattcccgctgtgtggccaccaaccagatgggcagtgcatcctgtgagctgaccttttctgtgaccgaaccctcccaaggccgagtgggcggagctctgattggggtgctgctgggcgtgctgttgctgtcagttgctgcgttctgcctggtcaggttccagaaagagagggggaagaagcccaaggagacatatgggggtagtgaccttcgggaggatgccatcgctcctgggatctctgagcacacttgcatgagggctgattctagcaaggggttcctggaaagaccctcgtctgccagcaccgtgacgaccaccaagtccaagctccctatggtcgggtgacttctcccgatccctgagggcggggagggggaatatcaataataaaagtctgtgggtaccacaaaaagaaaaaaaag

SEQ ID NO: 35313 - DNA, 439 bp, Homo sapiens
  misc_feature (1)...(439): n = A,T,C or G
aggcnnnnnnnnattgatcgacgtccactagtcagtgcggtggaattcgtagccgcaggcgtcgcttcaggggtcaggcagaagatagacagccaggtaacttgagtggacctgtggacaccatcaggtcacaagcatgaaaaaaatgtctatgtctgctttctaaatatattatacttacatgtacacatgtgtgcatatacattcaaaatttgcattgcataaattgtttattcaactaataagactactactattaagaaaatgcattcttccttcacagtgtgttagtaacttgtctaattgaactaatgttgtgtcctaattgtttacatggaaatactgttgagaagaccattttgttcacttggcagtttcttcacacttgagatggggcctgccatccgagggactgtgttgtagattgtgatcaaggttg

SEQ ID NO: 35314 - DNA, 443 bp, Homo sapiens
  misc_feature (1)...(443): n = A,T,C or G
ggggggnnnnnttttgttgtcgtccctatccgtgcggtggaattcctcccgaacacgcacagaaggaaggagccagctcccagcccactcatcgcagggctcatgattttttacaaattatgttttaattccaagtgtttctgtttcaaggaaggatgaataagttttattgaaaatgtggtaactttatttaaaatgatttttaacattatgagagactgctcagattctaagttgttggccttgtgtgtgtgtttttttttaagttctcatcattattacatagactgtgatgtatctttactggaaatgagcccaagcacacatgcatggcatttgttccacaggagggcatccctgtggatgtggctggagcatgaaccaactctgtcccaggatggtcccagcggatgctgccatgggcagtgaaaagattaagtgaa

SEQ ID NO: 35315 - DNA, 500 bp, Homo sapiens
  misc_feature (1)...(500): n = A,T,C or G
cgggccnnnnnnnnaacgatagacatccctagtgcagngnggnggaattcaaaacatcagtcttaagaaccaaagaataacaatggtaactaaagacgtaataactaaatgtgctgcatttttggtatgaaggacaattattgggacaatgagaaaacttgaaataagagcggtaaattacacaataattcctgtttcaataattgtactgtcgctacgtaagaaaatgttcttgttcttagaaaatatatatggaagtctttaggagtaaagggacactgtattcacaatttccactcaaatggttcccaaaatacttcatagtatctataaagacaatgataaaacaaatataaaatgtttaaaattgcgtaatatgggcaaagggtcaatgaggattcgttgtactaagtctgcaggggttgtttctactattttttgtagagacaggtctcatctcactatatgtngcccanattgtctcaaacctcttggctcaa

SEQ ID NO: 35316 - DNA, 438 bp, Homo sapiens
cccggctcgagccgagcaagataattacaactgttttcccaagcctttccatgaaagtcaacgaactgaggaccttgaaaaagacacgagcctaattgtgccatggacataatctgatataggttctgcctaacgtactgtccagctacaccactaacatattgcaaactcaactacacattaaatataatgacgtcttcttttttttatcttttctcctaaccacaatgtgatatgaatttatataaaatccagatactattaagatatacaacatagacggtgaaactccctgaagaactcttctcccagataatcatgaatggtttcatgaacaagcccccaaacttttgtatatgtatattaatacacagaagtattataaaaatggagggtacatcataatattctggaattatttttgggcagcatatcttg

SEQ ID NO: 35317 - DNA, 486 bp, Homo sapiens
  misc_feature (1)...(486): n = A,T,C or G
agcgggtnnnntttcgctcgcgntacactagtgcagngtggtggaattccgagcggcggcggcggcagcagcggcagcggcaagcaccatcctaattatctcatggctaatgaacgcatgaacctcatgaacatggccaagctgagtatcaagggcttgattgaatcagctctgaacctggggaggactcttgactctgactatgcacctctccagcaattctttgtggtgatggagcactgtctgaaacatggcttgaaagctaaaaaaacttttctcggacaaaataaatccttctgggggcctctagaactggtagaaaagcttgttccagaagccgcagagataacagcaagtgttaaagatcttccaggacttaagacaccagtaggtagaggaagagcctggcttcgtttggcattaatgcaaaagaaactttcagaatatatgaaagctttgatcaataagaaagaacttctcagtgan

SEQ ID NO: 35318 - DNA, 436 bp, Homo sapiens
gttttgcagacttcttcatctgtaagtagagttacccctttgatatgatgtggaattagaataatttatttttatctgtaaatactttgctttctaggtcattactaactctgtcttgttaatgattacagcttatattaaaagttagccttctgaaagccttcttcatatgtaattaaccagaagtgttaataaatactctgcttagagtttgtaataatagaagctcctaattttaggcaataagtaagcatttgcatttggaagacaatttcatttgaatatcagtgactttttttttttccttcctcaggctatgaaaggagaaaagggaattggtggagcagtcccagctacagatggactaagtgaagagcttacagaggaggcatttactaaccagttaccagctggcttaataaccacagacgggcaa

SEQ ID NO: 35319 - DNA, 387 bp, Homo sapiens
ccctaacacacggtccacagctcatcatgatggacttggagctgccgccgccgggactcccgtcccagcaggacatggatttgattgacatactttggaggcaagatatagatcttggagtaagtcgagaagtatttgacttcagtcagcgacggaaagagtatgagctggaaaaacagaaaaaacttgaaaaggaaagacaagaacaactccaaaaggagcaagagaaagcctttttcgctcagttacaactagatgaagagacaggtgaatttctcccaattcagccagcccagcacatccagtcagaaaccagtggatctgccaactactcccaggttgcccacattcccaaatcagatgctttgtactttgatgactgcatgc

SEQ ID NO: 35320 - DNA, 466 bp, Homo sapiens
  misc_feature (1)...(466): n = A,T,C or G
ntcgagatccatgtgagtgtgctggaattcaagccatcggatgaggagatgctgttcatctatggccactacaaacaagcaactgtgggcgacataaatacagaacggcccgggatgttggacttcacgggcaaggccaagtgggatgcctggaatgagctgaaagggacttccaaggaagatgccatgaaagcttacatcaacaaagtagaagagctaaagaaaaaatacgggatatgagagactggatttggttactgtgccatgtgtttatcctaaactgagacaatgccttgtttttttctaataccgtggatggtgggaattcgggaaaataaccagttaaaccagctactcaaggctgctcaccatacggctctaacagattaggggctaaaacgattactgactttccttgagtagtttttatctgaaatcaattaaaagtgtatttgttactttaaaa

SEQ ID NO: 35321 - DNA, 256 bp, Homo sapiens
  misc_feature (1)...(256): n = A,T,C or G
gcttgaaaagaggcattctatcttgggganaaaattaccattcatagtctaacattgatcgagacaagtattttatacttgagcaacacatggacaaaataaacagttgcttttcagccaatactgtggaacaaattattgaaaacttacaacaacatggttcatcttttgccctagagcaattgaaggtaattaataaaaacgtcccaacatctctaaagatcacactaacgcaactcatggaagagtcttcaaa

SEQ ID NO: 35322 - DNA, 461 bp, Homo sapiens
catcgatgatcattcgtccagtgcggtggaattcggagatggcgatggagatggagcaactggaaagaagaagaaaaagaagaagaagaagagaggaccaaaagttcaaacagaccctccctcagttccaatatgtgacctgtatcctaatggtgtatttcccaaaggacaagaatgcgaatacccacccacacaagatgggcgaacagctgcttggagaactacaagtgaagaaaagaaagcattatatcaggcaagtgaagagatttggaatgattttcgagaagctgcagaagcacatcgacaagttagaaaatacgtaatgagctggatcaagcctgggatgacaatgatagaaatctgtgaaaagttggaagactgttcacgcaagttaataaaagagaatggattaaatgcaggcctggcatttcctactggatgttctctcaataattgtgctg

SEQ ID NO: 35323 - DNA, 476 bp, Homo sapiens
  misc_feature (1)...(476): n = A,T,C or G
ctttcgacaccantangnttagtagaccactagtccagagccgcggaattgctcacataccgctctcccagctattcctactctctccccgacttagagagcatgcttaatcttgcttgagcttgtcatgtctgcagcctgatcatcgccgtaccatacgggaagagggcgattgctggggctcgagccctgcattcctttccttccagggcctgccccacagctcgggccctctgtgagatccgactttggcctcctccaaaatggagctggccctcttctggggatagagaaagggccccctgcttacccgcaaaagacaagtctttacagaatcaaatgcaattttaaatctgagagctcgctttgagtgactgggttttgtgattgcctctgaagcctatgtatgccatggaggcactaacaaactctgaggtttccgaaatcagaagcgaaaaaatcagtgaataaaccat

SEQ ID NO: 35324 - DNA, 462 bp, Homo sapiens
  misc_feature (1)...(462): n = A,T,C or G
catcgtgaccatcgttcgngcggtggaattcaccagcctgcccaacacggtgaaaccccgtctctactaaaaataccaaaaaagttagctgtgcgtggtggcgtgcacctgtggtcccagctactcatgtgggtgagggaggagaatcgcttgaacctgagaggtagaggttgtggtgagctgacatcatgccactgcacaatgcctgggtaacagtaagactttgtctcaaaaaaaaaaaaaaaaaatagattttccaaaatttaaaatttgtaaaacgatgccaccttttatttttgttttttaaaaaagggcggcaaacgcttttaaagagcttaacccaaaaaataaaaaaacccatggccttataaaagttttttaaccaccctcccccctgggcactgattttccttccaaagtatgggaggggtgaaatctgcttgctaggcttggtgggagggt

SEQ ID NO: 35325 - DNA, 394 bp, Homo sapiens
caaacaaaaaacaccaaccagaaagaccaagagccctactaggaaggactttaatagtttttcttagaaaaaaaaatttccagacacttaacatttcacaacatttcaacagcaaagtattagttgagagaggggttttcaggagttggagattatagaatattaggaagaaatgttggtatcctccattatagatggatggcataggtcacaaatgggagactggcagctaagccaatatcaaaacccagtggaatgacacttctatggagtttacttttcttcctgctatcttccctatcccacggaaatgtctgtcaccatgtaaagcccagtagcaggcagcttatgctccagtcttcccccttgggtaggaaaaggagtgaagggaatg

SEQ ID NO: 35326 - DNA, 385 bp, Homo sapiens
  misc_feature (1)...(385): n = A,T,C or G
ggccaagggtgtgacccctgggcctctgagccatggggtgacacctgaggccatccacgcctccctggatgtagccaccgtttccggagtcctgcttgtgtgcctgttgcagcttcccttccccagtggctgctcccctgaggcccggctttccgttctcttagtgggtctcgtgcttacccgtgggggccaggcctgccagcacgggaacaatatgactcggtcagagctctggtcagacccctgtgtgtgcctggcaggagccccggcagccgccgtcgctactttctgtgtgcacagcaacccctcccagtgttctgtgactcgggtggctcctgtccagatcctagtttgtcctctggagcactcccaggtcctccaggcn

SEQ ID NO: 35327 - DNA, 451 bp, Homo sapiens
  misc_feature (1)...(451): n = A,T,C or G
natgagatcgtaggcagtgcggnggaattcgntgattgcccaaggacttctaacaataaactctcttttgcaccacagacttctttgaaaatatacatgctgttgaccctctctgtagaaaaccgcacacataaaacttaccaacagatttcattggttcttgggttctcccgaagcctatccatggtttatagattaagaattgatgaggtagctgggcacagtggctcacacctacgatcacagcacttcgggaggctgaagcaagcagatcacttgaggtcaggagtttgagaccagcctggccaacatggtgaaaccctgtctctactaaaaatacaaaaagtagccagccgtgatgacaggcacctgtaatcccagctactcgggaggctgaggcatgagaattgcttgaacccggcaggcggaggttgcagtgagcctggatcaa

SEQ ID NO: 35328 - DNA, 385 bp, Homo sapiens
  misc_feature (1)...(385): n = A,T,C or G
gaagattcgctgaatcacttgttgaactatgtatgggccaatgtgtttgagacatctcctcatgtaattcaggcagttatgggagccctagagggcctgagagttgctattggaccatgtagaatgttgcaatattgtttacagggtctgtttcacccagcccggaaagtcagagatgtatattggaaaatttacaactccatctacattggttcccaggacgctctcatagcacattacccaagaatctacaacgatgataagaacacctatattcgttatgaacttgactatatcttataattttattgcttattttgtgtttaatgcacagctacttcacaccttaaacttgctttgatttggtgatgtaaacttttaaacn

SEQ ID NO: 35329 - DNA, 393 bp, Homo sapiens
caccggagcaggcagctgggggtgggggggcggccctgggataggggctgtggcagtacgcggggacccggctgcggtggctgcgggactgacgagaaactactaaagttcctggggaagcaaagtagaatttcataagaacaaaatggatggagaggagaaaacctatggtggctgtgaaggacctgatgccatgtatgtcaaattgatatcatctgatggccatgaatttattgtaaaaagagaacatgcattaacatcaggcacgataaaagccatgttgagtggcccaggtcagtttgctgagaacgaaaccaatgaggtcaattttagagagataccttcacatgtgctatcgaaagtatgcatgtattttacgtacaaggttcgctt

SEQ ID NO: 35330 - DNA, 492 bp, Homo sapiens
  misc_feature (1)...(492): n = A,T,C or G
nttgtcgacgaccctagtccagngnggnggaattcggacacgctcttcctctgcttcctggaagacctggagcggaacaacggctccctggaccggccctactacatgtccaagagccttctaaagattctgggcaagaagaacgaggcgcccccggacaacaagaagaggaagaagtgacagctccggccctgatccaggactgcaccccacccccaccgtccagccatccaacctcacttcgccttacaggtctccattttgtggtaaaaaaaggttttaggccaggcgccgtggctcacgcctgtaatccaacactttgagaggctgaggcgggcggatcacctgagtcaggagttcgagaccagcctggccaacatggtgaaacctccgtctctattaaaaatacaaaaattanccgagagtggtggcatgcacctgtcatcccagctactcgggaggctgaggcaggagaatcgcttgaacccggga

SEQ ID NO: 35331 - DNA, 458 bp, Homo sapiens
  misc_feature (1)...(458): n = A,T,C or G
catcgatgactattcgtccangcggnggaattccccaacctctcccatgaaatcacactgcagcacaggattttcataatccacgaatttgaccacatcaggccccactgtgcacccaccaccactcctctttatctcagccaatgatgtcccaacacccagaggccctcaagccttggccctgcagaccctacccccagtcaaaactctagtttcacaaacttcacttggttcctcaaaagcgccaggctctctcctaccgtgaggcctttgcacatgctgttcctcctctccttgtcttctctcccaccctcagtttagcagcctatgcctcctggaagcctttcttgactaccgtcagtactctgggtgtcccccatagcagtactaccgtgtttggcggcttgggggtagggaggcactgccacaagggcggcacactgagggcacaaagactc

SEQ ID NO: 35332 - DNA, 490 bp, Homo sapiens
  misc_feature (1)...(490): n = A,T,C or G
cccccccccccccnccccnccaatagagancctagatgatactcggcagngcggnggaattcagcccctctacctgtgttagcagatctggcaaccctgtaaggggggtgctagatggatccgatttgacagatggcaagactgaggcctggagaagtggaatcactggcctgaggtcacatgactagcacatggcaaggtcaggattcaagctaggtagtcagtatctcagccaggctgtctcctggctccctgaacattatggtgctgaccacaaactttcctgtccacttatacaaacttctagtgagtgtgtgtgattactagcttcatgaatacctgacccctccactctgaaggaggaacaggcctgtctggatcacttctctgtccctaactgagcccatctcatttagggaaactacagagcactgttgctttttttttttaaatggagtctcgttctgccgcccaggctggagtgcggtgg

SEQ ID NO: 35333 - DNA, 480 bp, Homo sapiens
  misc_feature (1)...(480): n = A,T,C or G
cgcccccgccgcccgnctttagagacccatgagatactaggcagngtggaggaaatcaaccccgatcaggcagtacagatttctgggatgtagatttcaaatgagtaccttgaagttctctaaatctccagatctctcagaactataacaaaatatttcttaggagactgagattttttactaccagaggtagagtcttgtcagaagtagactggccactcgaggggctattctagaggaaatagaagtctctgctgctgtagcgttcagcttcaagcatgcagctgaaagatgagatgtttgtatgggtcgggttggtgttctggaagaggattatgggaagaatcacgttattgttgttagggctggatttaacgtttggcctcaccacagccactgtctaggacaggtgttctcaacctgcctgttgagaatcggaatcacctggtctcattccttgaggattctgatgttgatggg

SEQ ID NO: 35334 - DNA, 394 bp, Homo sapiens
ccataaggctgttttacagaatagcacttctgataagctgtattaaatagccatgagcttcactgcttagagggagcagaaaggtcaacatctaaaagcaccttacaactagtttttgaacctgtcttgataagtgcttgaattcaagactggtcagtacaagagcagacaaaaatatcacaagtcagtcactgggtttccatttctgaattttatgcactccaaccatgaatttaaactaaatttttagaaatcaagtatctttctaagtgtgcttggatttatagacaatgtatgtacaatccaaatagaggagcttaatggaatccttttaagagactgggtggcttttttccctctttcccaacatgtttaagaaatgtaacattctaag

SEQ ID NO: 35335 - DNA, 387 bp, Homo sapiens
gcttggtcaaatgtggacgacttgagctatcaaatgccagttcatgaaaatgttagttttttgctgtttttctcctttcccagctgaaaatgtagccaaaaaatggcaagtgagtagagaagatcaggacaaggttgcagttctgtcccagaacaggacagagaatgcacagaaagctggccatttttgacaaagagattgtaccagttttggtgtcaactagaaaaggtcttattgaagttaaaacagatgagtttcctcgccatgggagcaacatagaagccatgtccaagctaaagccttactttcttactgatggaacgggaacagtcaccccagccaatgcttcaggaataaatgatggtgctgcagctgtcgttcttatga

SEQ ID NO: 35336 - DNA, 453 bp, Homo sapiens
  misc_feature (1)...(453): n = A,T,C or G
attgaatttcgtagaccctagcccagngcggtggaattcctgagagacagaggcagcgtgtttgagctgctggtgcggtggtcagcgctatgccctaggccaagggcaaaacccggaggcagaagtttggttacagtgtcaaccgaaagcgtctgaaccggaatgctcgacggaaggcagcgccgcggatcgaatgctcccacatccgacatgcctgggaccacgctaaatcggtacggcagaacctggccgagatggggttggctgtggaccccaacagggcggtgcccctccgtaagagaaaggtgaaggccatggaggtggacatagaggagaggcctaaagagcttgtacggaagccctatgtgctgaatgacctggaggcagaagccagccttccagaaaagaaaggaaatactctgtctcgggacctcattgactatgtacgctaca

SEQ ID NO: 35337 - DNA, 460 bp, Homo sapiens
gctggccttcttcgccttctcctcggctgtggagccctggtggggggtctgcgcccggtcaccatgacgacgccggcgaatgcccagaatgccagcaaaacgtgggaactgagtctgtatgagctgcaccggaccccgcaggaagccataatggatggcacagagattgctgtttcccctcggtcactgcattcagaactcatgtgccctatctgcctggacatgctgaagaatacgatgaccaccaaggagtgcctccacagattctgctctgactgcattgtcacagccctacggagcgggtaataggagagacatgtttgagatgagatgaaggggtacaaagttagggccctctcactggtcttgagtcagcctaggcttcagttcccttgactgaccactcagggcttcccttctcctaccccaggaacaaggagtgtcctacctgccgaaagaa

SEQ ID NO: 35338 - DNA, 440 bp, Homo sapiens
  misc_feature (1)...(440): n = A,T,C or G
aggggggnnnnntttgatcgtagtccctagtccgtgtggtggaattcgtctatctcattgccttggctgtctgtcagtgccgccgaaagaactacgggcagctggacatctttccagcccgggatacctaccatcctatgagcgagtaccccacctaccacacccatgggcgctatgtgccccctagcagtaccgatcgtagcccctatgagaaggtttctgcaggtaatggtggcagcagcctctcttacacaaacccagcagtggcagccacttctgccaacttgtaggggcacgtcgcccgctgagctgagtggccagccagtgccattccactccactcaggttcttcagggccagagcccctgcaccctgtttgggctggtgagctgggagttcaggtgggctgctcacagcctccttcagaggccccaccaatt

SEQ ID NO: 35339 - DNA, 437 bp, Homo sapiens
  misc_feature (1)...(437): n = A,T,C or G
agggggnnnnnatcgttgtccctactccgtgtggtggaattccttaccttaataaaacaatgaggcataggtataaatgaaggaacatgcaggtcagctgtcagtgcatgagtggactgaatgctatgaaattgcatacttttctgttggatgtttcatgggagagactttgcttagaagttagctgagtaatcatgtgatcttggtatgagtgttaagcattcagcatggctttgagtctgaacaaaagagcaaacaagccctggtgagatgaagaagggagcaggagcctggagatgcctgaagatgttggtgagaatcacaacctggagtgcatgggggtggtctcctcaccaacccttggcacagtgggtttcatcttcaccttgaaggagagcaggccagacaagatctcagcacagcttcgcaactgcgtc

SEQ ID NO: 35340 - DNA, 401 bp, Homo sapiens
gaagagatcttagagctcattttgttttatctcctcattgtatggataaagtgtagtgcaaaagagtgagttctaggccagaggtaggccaataatttaattttcccaactcacgggccaaggttctttccactgcaccataatactgatccccaattttaaggttccttgtctgtccttctaaaccatcaattcactcaacaactgcttaagtgtatatagtatgtgcacatctgtgccatttgttgggtatgcaaagtctaaaagacagggtgcctgccctgagatgctcatgacctaattcaaatgcatccttcctgtccctctccccacttctcctggatcttctcatctgtatccttttccacgtttgtaaatataaattcaatagaaataaacaa

SEQ ID NO: 35341 - DNA, 468 bp, Homo sapiens
  misc_feature (1)...(468): n = A,T,C or G
ngtcgagatccctagtcgaagtccntgaattcggtgccgctgcagccggcagagatggttgagctcatgttcccgctgttgctcctccttctgcccttccttctgtatatggctgcgccccaaatcaggaaaatgctgtccagtggggtgtgtacatcaactgttcagcttcctgggaaagtagttgtggtcacaggagctaatacaggtatcgggaaggagacagccaaagagctggctcagagaggagctcgagtatatttagcttgccgggatgtggaaaagggggaattggtggccaaagagatccagaccacgacagggaaccagcaggtgttggtgcggaaactggacctgtctgatactaagtctattcgagcttttgctaagggcttcttagctgaggaaaagcacctccacgttttgatcaacaatgcaggagtgatgatgtgtccgtactcgaagacn

SEQ ID NO: 35342 - DNA, 404 bp, Homo sapiens
ctttgattcctacttttggtttttaaccgatctacactttcagtggccgacagaatatgagggacaatactgtgcatcacaaggcctaggaggctgctggtccccactggggctgaagagaagcccatctgcccacgcggagccaggggtggcagctgtgggacagccggggagcacggacagcggtctgtccttcacaggtgtttctactgtgtttttgctggagaaggaccgtgattgcgctagctttctcttacccggtatgaattatttagatatctgaggcattttcttgataaacaaaaggctatttttaagtactgagaggaggagcaggcctcacgagggataatgttgtgggaattcccaaagctctatgtacgtagtgccagaggggggctttt

SEQ ID NO: 35343 - DNA, 462 bp, Homo sapiens
  misc_feature (1)...(462): n = A,T,C or G
catcgatgaccattcgtccagtgcggtggaattcgatctgcaccgtgccctggagctcacccgccgcctgctctcccttgacccaagccacgaacgagctggagggaatctgcggtactttgagcagttattggaggaagagagagaaaaaacgttaacaaatcagacagaagctgagctagcaaccccagaaggcatctatgagaggcctgtggactacctgcctgagagggatgtttacgagagcctctgtcgtggggagggtgtcaaactgacaccccgtagacagaagaggcttttctgtaggtaccaccatggcaacagggccccacagctgctcattgcccccttcaaagaggaggacgagtgggacagcccgcacatcgtcaggtactacgatgtcatgtctgatgaggaaatcgagaggatcaaggagatcgcanaacctatacttgcacgagc

SEQ ID NO: 35344 - DNA, 437 bp, Homo sapiens
gtatgttagtttcatcagaaacttaaaacatagactgatcactcagaaattaaagtccgttttactgtgaatatagcaatatagtactggacacagtactggtgaaactgaggagagcattgcttgtaaaatcctgagtttccataaggaaaatgaaaactccttttaaaaataaaatctgaggagtgtacaataagcatatgctttgactttcctttgctgtggaggtttttggtttttcattgatgataaacgactacagacttagtagtggagaaatggtgtcctctagtggaagaaatagtaggctccgctattcagatgcagagcactgcagcatccagcctttcaaagctgactcttctcaatcatctgtgggtcatttgacttgattttttaagctaccctgaatttccagaatgcaggttctaaagaaa

SEQ ID NO: 35345 - DNA, 484 bp, Homo sapiens
  misc_feature (1)...(484): n = A,T,C or G
agcgtcctnnaatcgataacctactccagtgtcgtggaattcgccttcatgaaaacagccactggcctctgcagagatgactgggagcagcataccactgcccacctctatggcctccttcacacaccttcacggagcacaaactctgtcctgttttcccaggagaaagacgggatgcactgaacccctagcttctctctcgcctggtcccctctgcaataaaaggcccaggtctacaagatggcaaagaaggggaggaagaacagtatgtacctgcagaatttaaatttttctctgcatcaaagctctaacgttggtcccatcagcataggctccagccaaagaagctcctccacccaaaataagggagagatccaaagggaggcgatacaatgacgtgaaaccatagaggtaagaagcaaggcctcctaatacttgactctatgctaaactgttctgaacttgtgggtagatcttctttggt

SEQ ID NO: 35346 - DNA, 471 bp, Homo sapiens
  misc_feature (1)...(471): n = A,T,C or G
ntcgagaccatgtcgtagaccactagtcagtgtggnggaattcggcaaactgagactggtggaaattgctcaagtgccaaaagcacatgtagacgagttcaagtctgtatcatagttcaaaatatttaatacaaacaacctatggatttctcttgcagcagttaaaagactgcaggagcaaaatgccattgacatggaaatcattgtgaatgcaaagactttggatggaggcctgaatgtcattcaattagaaactgcagtaagggctgccatcaaaagttttgagaattctctaggtattaatgtgccaaggagccgttttctgcctgtcaaaaccacatcagatctcttgctggtgatgtcaaacctctatagtcttaatgcaggatctctgacaatgagtgaaaagcgggaatttcctacagtgcccttggttaaattaggcagttcttttacgaaggatcaagatta

SEQ ID NO: 35347 - DNA, 481 bp, Homo sapiens
  misc_feature (1)...(481): n = A,T,C or G
gagtnttnnnaatcgatgtcctacgtagtgtcgtggaattctaacttttgagcctcacctgcttgagtggctgccgccctgtcagctccagccgcctccagctcagccctttctgtgagagtccctctgctgctcactctgatccagaggcaccctgagttggtgctttggatcagggaagccactttgggacaggtccataaagtgaactgatcttaccgagtcaggacctcagccagctctcaagaggttctgctcagccttaacttctcaactttgccttagcacagggtttctgtagggagtgggggctgctagaggggattagttccggagactgagactgttggctccacctccaagctgagctagggtggagggcagggtgggcaggaagtgacaggaagttaagctgttcctctccctggctgctgctctggatggccagagaacaagatgctcccttgctgagctcctggga

SEQ ID NO: 35348 - DNA, 475 bp, Homo sapiens
  misc_feature (1)...(475): n = A,T,C or G
nttcgagaccccttttcgagatcactagtccgtgtggtggaattcgctccagatatcatctttaactcctttgccttctccacatacatttccaagtcctgttcattctacctccaaaatgtatcttgtatccattcatctctctccatcttcaatctatttcaatgccccatcatctcttgcatggaggagtgtaataattggctaactggcctgttcttacattttaaaatcaaaagatgtgacaggtgaaatgcctatttcagtgtccattgatggttctgcttacacaccacctggctgcctggtgtcgcagtggcagagttgagcagtgtgaaaaagactgcttggccctttacagggaaagcaggtccactgtggcctgtgaggacgagagctctgggcaggctcggacactggcagaccctggtcctggctggccaaggcagcagggtatgtgtttcgggtcactcac

SEQ ID NO: 35349 - DNA, 471 bp, Homo sapiens
  misc_feature (1)...(471): n = A,T,C or G
nttcgagaccactagtgagtgtcgtggaattctcacctaccagtgcgagcctggctacgagctgctaggctccgacattctcacttgccagtgggacctgtcttggagcgccgcgccgcccgcctgccaaaagatcatgacttgtgctgaccctggcgagattgccaacgggcaccgcaccgcctcggacgccggcttccccgttggctcccacgtccagtaccgctgcctgccagggtacagcctcgagggggcagccatgctcacctgctacagccgggacacaggcacacccaagtggagcgatagggtccccaaatgcgccttgaagtacgagccgtgcctgaacccgggggttcccgagaatggctaccagacgctgtacaagcaccactaccaggcgggcgagtctctgcgcttcttctgctatgagggctttgagcttatcggcgaggtcaccatcacctgtgt

SEQ ID NO: 35350 - DNA, 473 bp, Homo sapiens
  misc_feature (1)...(473): n = A,T,C or G
aggtcgggncnncccccctgagaccctttgnttctaggaaantcccgggactgcccctgggcactctgtggatggtgtgcgggcggatgggtgagtgtgcggacattggtgggtctgaggctggccctgtgtggtgtgagggttggtggtcaggacctgggcgggtggtcctgagtgctggcccgtgtgcttgaaagggtgtggtgctattgggtcctactgtgttccccaggtcccgcagcccccggaagccaatagactccctcagggactctcggtccctcagctactcgcctgtggagcgtcgccgtccctcgccccagccctcaccacgggaccagcagagcatcagcagtgagcggggttcccggagaggccagcgtggggacagccgctcccccagccacaagcgcaggagggagacacctagccctcggcccatgagacaccgctcctccaggtctccataaatt

SEQ ID NO: 35351 - DNA, 474 bp, Homo sapiens
  misc_feature (1)...(474): n = A,T,C or G
gggagggnnncccccatagagaccatagaccacgtcggggaattccgaagctcggcccaggacccccaggctgtgctgggggccctgggcagggccctgagccccttggaggagtggcttcggctgcacacctacttggccggggaggcccccactctggctgacctggcggctgtcacagccttgctgctgcctttccgatacgtcctagacccacctgcccgccggatctggaataatgtgactcgctggtttgtcacgtgtgtccggcagccagaattccgagccgtgctaggagaagtggttctatactcaggagccaggcctctctctcatcagccaggccccgaggctcctgccctcccaaagacagctgctcagctcaagaaagaggcaaagaaacgggagaagctagagaaattccaacagaagcagaagatccaacagcagcagccacctccaggggagaagaaa

SEQ ID NO: 35352 - DNA, 452 bp, Homo sapiens
  misc_feature (1)...(452): n = A,T,C or G
attgagatcgtatgacactagcccangcggtggaattcggcctctccaacggggccatgaatatgctggaggtgtttgtgtctagcctggaggagtttcagccagacctggtggtcctttctggattgcacatgatggagggacaaagcaaggagctccagaggaagagactcttggaggtaatggcactgttacagaatttcacagatctcagctggtggttttcttcaggttccagcctctcttggcatctgctgccttgtttcctgtggaaacagcaagcagctctgcacggttcttctcatccttgccttgcagaagagcctgtttatttttgcctctgtcacttcctgaagaaatcaatgtattttcaatacagtgtggctcctttctcctaggttcagttaggtcgtgtttcctagcagtgtcactattcaagggttgagtccacg

SEQ ID NO: 35353 - DNA, 436 bp, Homo sapiens
  misc_feature (1)...(436): n = A,T,C or G
aggggtnnnnnnaatcgatatcactactccagtgcggtggaattctatagttgaagataaaatgttgagtgcacttattttagaatatcctagacataactgtctaagtaaaagcgctctattaatctaaaacactacaagagaatttaacaccatctctcaaatgcttttttggagagcttaatgggattctgaatatttgcaatgtggagtttccgccccgatctcacgtcagtgagggtctcctgtctctcaagtgtgtttcctttggctgttccctaatacaaaacacggacatatttttactcgtagcactcaatttagtaacttctagatgctacccgtgacctgagttaaattcatttagtcgtgtacgtaaaaactctccttttagtgggtattttcttgcctctccttttnaaggtaaagttctacc

SEQ ID NO: 35354 - DNA, 467 bp, Homo sapiens
  misc_feature (1)...(467): n = A,T,C or G
nttcgagaccactagtccatgtcgtggaattcgtggagaaggacgtgccgtgccgctgggttctgagccggagtggtcggtgggtgggatggaggcgaccttggagcagcacttggaagacacaatgaagaatccctccattgttggagtcctgtgcacagattcacaaggacttaatctgggttgccgcgggaccctgtcagatgagcatgctggagtgatatctgttctagcccagcaagcagctaagctaacctctgaccccactgatattcctgtggtgtgtctagaatcagataatgggaacattatgatccagaaacacgatggcatcacggtggcagtgcacaaaatggcctcttgatgctcatatctgttcttcagcagcctgtcataggaactggatcctacctatgttaattaccttatagaactactaaagttccagtagttaggccattcattta

SEQ ID NO: 35355 - DNA, 421 bp, Homo sapiens
cgtgatcgaacctgtatcatttgggatttgaacaaactgtcatttctaacccagcttcgagggcatcgagctccagtttctgctctttgtatcaatgaattaacaggggacattgtgtcctgcgctggcacatatatccatgtgtggagcatcaatgggaaccctatcgtgagtgtcaacacgttcacaggtaggagccagcagatcatctgctgctgcatgtcggagatgaacgaatgggacacgcagaacgtcatagtgacaggacactcagatggaagtggtcggttttggagaatggaatttttgcaagttcctgaaacaccagctcctgagcctgctgaagtcctagaaatgcaggaagactgtccagaagcacaaatagggcaggaagcccaagacgaggacagcagtgattcag

SEQ ID NO: 35356 - DNA, 455 bp, Homo sapiens
atcgtgactatcagtccatgcggtggaattcgtaagaccacatttgagtattacttactctgtagaatcaaaacagagtagttaacaccaattatgcaaactacttttttttccagcagaaagggagctgacatgatcaaatccatgttttcaaatgaactgaaaaaggcatccagcaccacttataacacatttatttcagttccaggctgacagccctggggcatctagcaggatgcataattgtcatctggtgagagttgggactttgctcaattttaataccaatctctcctgattgtaattacctccactactttcatgatccccctacaatatttttttaaatgatatatttattcactgaatcaaatgtcattaatgagttatcttctgtggaggatgactgttctctttgttaatgttcacaatcaagatcttgggctgagaagagg

SEQ ID NO: 35357 - DNA, 422 bp, Homo sapiens
agctgggggaacttctagttagtggtggtagattaaataagcatacctgagagaaattcaaagttagacttccacaaggcaccaaggtgcagcacacatgaaatatgaaagtgagaggttcaaaggaaatgactgaggatcagttagatggttctataccccacaaatatgtatgagagtcaacagaattttatgagaaagacttctttgcagaaaactgctctatgagccttctcactctacctacccacaaaagtgagagaaggaggaatgtctgctccttgacctcaaatttagtgagagaagatttctcagatagctcagatagctcagatttctcagaaccacaacaattaggatgcatggctgatggaagtctgattcttgcctagaattgtggccacagctccggtagtagagcc

SEQ ID NO: 35358 - DNA, 456 bp, Homo sapiens
  misc_feature (1)...(456): n = A,T,C or G
atcgatgaccatcgtccangcggnggaattcaaatcttaatgaggcttgctgaaagagaagcacaaaacagaataattaccacactgcacaggctcagattcattctagggcccttctaccccactcttgacccaccccttctatgaggccaagtgcaacttacccttcactatggaaatcactccagacatccccatggttgaaattcaggcacaactgattttcatcctcagaaagagaagtttttccttacctcgcttttgaagcccagccaccaggttttcattttctaattcagaatgattgatgataggaatattcatccctttctgggaaaatcaacccaaagtatactttgtggcaccactaggtcaatcatacagtaatttgatatcaagacatattctgaagtctgggcaattcacttaaatgatacccatgtcaacttcaacagc

SEQ ID NO: 35359 - DNA, 392 bp, Homo sapiens
  misc_feature (1)...(392): n = A,T,C or G
aaagtggaagcgaagccgaaaaaggcagcagcgaaggataaatcttcagacaaaaaagtgcaaacaaaagggaaaaggggagcaaagggaaaacaggccgaagtggctaaccaagaaactaaagaagacttacctgcggaaaacggggaaacgaagactgaggagagtccagcctctgatgaagcaggagagaaagaagccaagtctgattaataaccatataccatgtcttatcagtggtccctgtctcccttcttgtacaatccagaggaatatttttatcaactattttgtaaatgcaagttttttagtagctctagaaacatttttaagaaggagggaatcccacctcatcccattttttaagtgtaaatgctttgttttatgaggan

SEQ ID NO: 35360 - DNA, 478 bp, Homo sapiens
  misc_feature (1)...(478): n = A,T,C or G
aggaagggggcccgccatcgagatcctagatcaccgtcgnggaattcgacatccacttctcgccgcattggaccagaactatccaggcgtatctaccttcagatgaccactttacagccacatctctctttagatagtgctgactgattctagccctcagggatgaggatgaaaagctggaaacttccacttccccaacctcagagcctgactgtaatgaagagactggcagcacctcctggaacacaagcctaggtgaggcccagtctttcttgggtcttattatttgtgaaggtctctctgcctgtcggctggggcagagactgaaatactgccacctacctttggcatttaatgttcctctcctggcaaaaattcactgccacagacaaaccacccccactcctacccagccagccctcaaaacacaaaggaacaaagacagtccactcagacacttatttaataactgtagaaa

SEQ ID NO: 35361 - DNA, 453 bp, Homo sapiens
  misc_feature (1)...(453): n = A,T,C or G
attgagnactgagacgctagaaagngcggnggaattccacagcttggagcaaccatggaccactccgagatctcgggaagttgctagtgaggtgctcacctcactgcttcaagttactgaatgcgggtctgtggcaggattcctacatggagaaaatgaagatgagaaagggagactttcggtgatactagggcttctcaaacccgacttgtataaggaatcctggaagaataaccctgccatcaaacatgttttctcatggactctgcaacaggtcactcggccctggctgagccagcatctggaaagggtacttcccgcatcattggtcatttcagatgactatcagactgagaacaaaatcctgggtgtacactgtctccatcacattgtgcttaatgtgccagctgctgatttgctccagtataacagagcccaggtcctataccatgc

SEQ ID NO: 35362 - DNA, 509 bp, Homo sapiens
  misc_feature (1)...(509): n = A,T,C or G
aggnccgnnnnnnnnattggtgaacactcgttcagtgtggnggaattccccatgaggaggtagacgcaaaggagtaggagacacacagcaggatcaaatcagtcgggagcaaaataggaagaatctggaaaagaagaaataaaagcagaattttagacaggacctagtacactcaaggttcctgccaattgctaacgaagctgaagtctccctatcagtaaaagaaataaatattggataccaagagcctcagagacttatactgagttgaagatggaagcaatgaaaaaagagactcactgtattagcaagtggatacttggtgctgctggactgcaaaatttgtctaaagattaagaaaatattagggaaaatctcctatagatagggcaggtataaagtaaacacagtgtactagtccattctcataccactaatactgctatgaagaaatacccgagactgggtaatttataaagaaaaagaggcttcacggattcacagttccc

SEQ ID NO: 35363 - DNA, 477 bp, Homo sapiens
  misc_feature (1)...(477): n = A,T,C or G
aggagtgcccgcnnttagaaaacanctgagancattaggccagagcggnggaattccagttccctaggggttctgcccctccccctctctggggcaccagccccccagggtcctgcatcccaccatgtcgatggctgtggaaacctttggcttcttcatggcaactgtggggctgctgatgctgggggtgactctgccaaacagctactggcgagtgtccactgtgcacgggaacgtcatcaccaccaacaccatcttcgagaacctctggtttagctgtgccaccgactccctgggcgtctacaactgctgggagttcccgtccatgctggccctctctgggtatattcaggcctgccgggcactcatgatcaccgccatcctcctgggcttcctcggcctcttgctaggcatagcgggcctgcgctgcaccaacattgggggcctggagctctccaggaaagccaagctggcggc

SEQ ID NO: 35364 - DNA, 439 bp, Homo sapiens
  misc_feature (1)...(439): n = A,T,C or G
cccatatctgtatatatttaaacctaattaattcttgagctgaaaataaataaaccaggatggcagggaccaacccctaatccctccccagcggcaagcccctcttttcagagtgggcagagggttgcctatggtgggcactaggaatgaggtcccctgcctcgatgcgggtcctaggagaaaagtcctacttttctgggtccccaggtgcagcacctcccggagactgtttctcccatggcctcctgagtgatgggccctgcctccctgtgcctcatcctcaggctggttggagcagagggtgggcaggagccccagcacagactggggggtgctcacagcagggccaccttgatgcaggctggaatgttatccctggggtgtgcttggaccccacctgctttctttctctcctgcccctcccctactctgactgtan

SEQ ID NO: 35365 - DNA, 457 bp, Homo sapiens
  misc_feature (1)...(457): n = A,T,C or G
natcgaagactgatgatcactaggcagngcggtggaattcggaggctgaggcaggagaatagcgtgaacctgggaggcggagcttgtggtgagctgagatggcgccattgcactccattcagcctgggcaacagagcgagactctctcaaaaaaaaaaaaccaaccaaaaaaaaaccgggtccctttggttttaataaaaaaaaaaatgggcaaacctggaaagggcccggaaaaaaaatatgtaaaaaaaaaagggggccagtaactttccctgatttggaaacccaagtgggggttataaaaaaaatggccctataagcccgggaccacctaaaaaaactgggggccaggggtttaacagtaagcatttccctctaaccggagtaaaaaaaaaaaataaggggccctatactcccaccttttctggaccttggggataatttcataagaacaatt

SEQ ID NO: 35366 - DNA, 471 bp, Homo sapiens
  misc_feature (1)...(471): n = A,T,C or G
ntaganaccctannnnannttcgtagacactatccaagtggaggaattccatgccagccccacagtacagagggtttctagagagaaggcaaacaaacatccccccccttttctcttcttcgttgtcaagaaatgaacaaagtaaagtggggagggggcatcatatcacgtgatcattggagaggggaaggcagggctggaggctttggcacaggacagggcagatgggtctcagctgtgcctggctgtaaccccacactgctctctcccactcgttcgctgagggttcccacacttcttagagaaacagtattccggagcaaggtctgagtcagtagaatcaaacccactttcagttctgacctagggaaaagcaaccctgagtagaaagtgaggaagggtgcctcaactgggagccctcagaatggagcctgagaaagaggagggagggtaggtgtgaaaggagggcag

SEQ ID NO: 35367 - DNA, 464 bp, Homo sapiens
  misc_feature (1)...(464): n = A,T,C or G
cttgatcgcaatccctagnccgngcggtggaattccaagaaaactgaaggatctggggaatcagttggttatcttccattgagtttttctttatggacaggagctaatggaagtgacagtcatgttcaaaggaagcatttctagaaaaaaggagataatgtttttaaatttcattatcaaacttgcgcaattctgtttgtgtaactccccgactagtggatgggagagtcccattgctaaaattcagctactcagataaattcaaaatgggtcaaggcacctgcctgtttttgttggcgcacagagattgacttgattcagagagacaattcactccatccctatggcagaggaatgggttagccctaatgtagaatgacattgcttttaaaactgttttatatcttaagagtgccttattaaagcatagatgtatgtcttaaaatgtgggtgataggaattct

SEQ ID NO: 35368 - DNA, 455 bp, Homo sapiens
ccacccgccaattctaatgcttacatgttctagccccactcccggctcacactcttaggcagaaattcattgctcctgtaaattaagtaataattaataccgctaatgagaaatctgggagtacaggaggtgattttaaaaaatgctcgtatttcctttgattagagtagcaattgttagggatacatgagccagatttggttttatgtaaaaaaaatctttcagttgatgagttcttgtttaaattgtattgctgtggcaatttcttattgtaataatatgtaggagaatttctaatttgaatccctttatttacagaaagctcactgtaaatttgtaggaatgtcatggtactaccccattaaagtatttttattagtggttagttattgattcagcagtctctaattggtgccaaaatggtgcttagattagattggcattgctacccatgg

SEQ ID NO: 35369 - DNA, 500 bp, Homo sapiens
  misc_feature (1)...(500): n = A,T,C or G
gggnntnnnnnncctgatgtcatacttagtgtggtggaattcggcaccaggccacctctgttgggacccacaggaaagagtgtggcagcaactgcctggctgacctttctatcttctctaggctcaggtactgctcctccatgcccatggctgggccgtggggagaagaagctctcatacgccttcccactccctctggtttataggacttcactccctagccaacaggagaggaggcctcctggggtttccccagggcagtaggtcaaacgacctcatcacagtcttccttcctcttcaagcgtttcatgttgaacacagctctctccactcccttgtgatttctgagggtcaccactgccagcctcaggcaacatagagagcctcctgttctttctatgcttggnctgactgagcctaaagttgagaaaatgggtggccaaggccagtgccagtgtcttggggccccttttngctctcctcactctctgaggctncag

SEQ ID NO: 35370 - DNA, 455 bp, Homo sapiens
aagtgccagacgaaatgccccttaattttgacctctgctctggtgtggtggccgagcctggagcctgtgctgctctgccggtggaggagacactgccagagcccgctgccccgggaactgcagaagctacaagaaggccggcagtttgccagcgatttcctctcccctgaggctgcctccccagcacccaacccggactggctctcagctgctgcactgcactttgcgattcaacaagtcagggaagaaaacatcaggaagcagctaaagaagctggactgcgagagagaggagctattggttttccttttcttcttctccttgatgggcctgctgtcgtcacatctgacctcaaatagcaccacagacctgccaaaggctttccacgtttgtgcagcaatcctcgagtgtttagagaagaggaagatatcctgggctgcactctttcagttgac

SEQ ID NO: 35371 - DNA, 455 bp, Homo sapiens
  misc_feature (1)...(455): n = A,T,C or G
natcgagatcgatagccagtgcggnggaattcgatatttatttggattggcaaagatgctaatgaagttgagaaaaaagaatctctgaagtctgccaaaatgtaccttgagacagacccttctggaagagacaagaggacaccaattgtcatcataaaacagggccatgagccacccacattcacaggctggttcctgggctgggattccagcaagtggtaaattggtatttgtaaaaagcaaacaaacattacaaggcagttatctcattgctgttttgggagaggaacgggaaaagctttttgcttatttgtcttttgaaaattaaggctgggcgcggtggctcacacctgtaatcccagcactttgagaggatgaggtaggcggatcactgnggtcaggatttcgagaccagcctggccaacatggcgaaacctcgcctctactaaaaatan

SEQ ID NO: 35372 - DNA, 386 bp, Homo sapiens
ggttcttcgttatccgcgatgcgtttgctggcagctacattcctgctcctggcgctcagcaccgctgcccaggccgaaccggtgcagttcaaggactgcggatctgtggatggagttataaaggaagtgaatgtgagcccatgccccacccaaccctgccagctgagcaaaggacagtcttacagcgtcaatgtcaccttcaccagcaatattcagtctaaaagcagcaaggccgtggtgcatggcatcctgatgggcgtcccagctccctttcccattcctgagcctgatggttgtaagagtggaattaactgccctatccaaaaagacaagacctatagctacctgaataaactaccagtgaaaagcgaatatccctctataag

SEQ ID NO: 35373 - DNA, 439 bp, Homo sapiens
  misc_feature (1)...(439): n = A,T,C or G
tgggtncnnnnaatcgctgatcactactccagtgcggtggaattctccggcgtagccatggtggctaacgctactaccaacccgtcgcagctgctgacgttagagcttgtggacaaatgtatacgatcaagaattcacatcgcgatgaagagtgataaggaaattgttggtactcttctaggatttgatgactttgtcactatggcactggaagatgtcactgagtttgaaatcacaccagaaggaagaaggattactacattagatcagatcttgctaaatggaaataatataacaatgctggttcctggaggagaaggacctgaagtgtgaatgaggttccttgacttacactagattttgttttggcttataatgacaagaaaatggaattttttttcccactgtctaatgatcaaatcccataaagctaagtttg

SEQ ID NO: 35374 - DNA, 444 bp, Homo sapiens
  misc_feature (1)...(444): n = A,T,C or G
gggcttctctgtcctgtgtaattggaagaaagggtgataaaggactgtgtgtatgaatatgggccttaagttttggggctttctccccttctgttgcctttctgattctgcccagttgtcagctggtatgggatgttgggcttgggataccagggtttcgcatatctggagaaagcctggctcatggaccgtctttgtcttgcttagagttcctatcagactgagattgggcagaccctggacctcctcacagccccccagggcaatgtggatcttgtcagattcactgaaaagaggtgaggggaggtgagggacagcgcgaaccatgtctggacagcgagggagggctcaagatgtgcattgccctcctgaggagtttctcttctccccttactcangtacaaatctattgtcaagtacaagacagctttctactccttctac

SEQ ID NO: 35375 - DNA, 488 bp, Homo sapiens
  misc_feature (1)...(488): n = A,T,C or G
aggggcctnnaatcgtgatcctacttagtgtggtggaattccaggaaaaagaatgcacattgaatggatgtgagagaccacattgcctctcccactgctttggggagcactttcctgtcatttctaacttaccacatgcttggtgtactatatgtacgttgtgcctcatatgttgcaaagaactaaggtgagtatagcctactagatatgggcaatatccagcctagatgattggaaagataccagtttaagtaaacttggtaaaatccaagtcttttttttttttttttttccagaaacaactactttttttaatatacggggggttgggggcaccacatttcttttttagggggaaacaaaggggaaacccccccaaaatttgggggacaggggaaaaaaaaactcttttgacctttttttggggggccaggatttgtttttcaaaatggaggttaaaataaggggaataaaccggatttggttgg

SEQ ID NO: 35376 - DNA, 492 bp, Homo sapiens
  misc_feature (1)...(492): n = A,T,C or G
nttgtcgacgaccctaggccgcgnggnggaattccgaanagagagacaaaaccagatcaaatgcaaaaatatttagtggaaagaaagaaattctaagcaatcagcccaggagttaaagtcactggttgaaaaaaaatctctcaaagagaagcctccaatttctgggaagcagtcgatattatctgtacgcctagaacagtgccctctgcagctgaataacccttttaacgagtattccaaatttgatggcaagggtcatgtaggtacaacagcaaccaagaagatcgatgtctacctccctctgcactcgagccaggacagactgctgccaatgaccgtggtgacaatggccagcgccagggtgcaggacctgatcgggctcatctgctggcagtatacaagcgaaggacgggagccgaagctcaatgacaatgtcagtgcctactgcctgcatattgctgaggatgatggggaggtggacaccgatttccn

SEQ ID NO: 35377 - DNA, 469 bp, Homo sapiens
  misc_feature (1)...(469): n = A,T,C or G
gcagtccnnnnnnaattgagactgagnacatctagaccgngcggnggaattccggctgacgtcaccggaggatgtggcagagtcggcgcgggagagctgggccgggaggcgccggaagcggcggccggggatccgctgccactgcagcctacacccttcccggccctcggtgcttgtcttttctttggcgttcctgcgccccctgacccgcggtcctgcagtcctgctcccgtgacgtgccctccctccttccgttccccgtttccccttcactacccagggctggagcctgaacctggcggggccccccgtgaatggaagagcctgggccacgcgaaggtggaccccactcagcctccagccgtgccctccacgccccagacaccgccgtcttcggaggcgactccgcggtcgtgtggacggngtcccatttggactccggggtctgcaggatcggcaggaaggactt

SEQ ID NO: 35378 - DNA, 423 bp, Homo sapiens
gttggatgtactggaaaagtcataggaattgatcacattaaagagctagtagatgactcaataaataatgtcaggaaggacgatccaacacttctgtcttcagggagagtacagcttgttgtgggggatggaagaatgggatatgctgaagaagccccttatgatgccattcatgtgggagctgcagcccctgttgtaccccaggcgctaatagatcagttaaagcccggaggaagattgatattgcctgttggtcctgcaggcggaaaccaaatgttggagcagtatgacaagctacaagatggcagcatcaaaatgaagcctctgatgggggtgatatacgtgcctttaacagataaagaaaagcagtggtccagggatgaattgtaaaagcaacatcagcttgaccagtataaaattaca

SEQ ID NO: 35379 - DNA, 429 bp, Homo sapiens
gtggaggtttgctacagaagttgacaagagatctcttgaattgttccttcaagtgtagctatgttgtaactaatggccttgggattaacgtcttcaaggacccagttgctgatcccaacaaaaggtccaaaaagggccgattatctttacataggacgccagcagggaattttgttacactggaggaaggaaaaggagaccttgaggaatatggtcaggatcttctccatactgtcttcaagaatggcaaggtgacaaaaagctattcatttgatgaaataagaaaaaatgcacagctgaatattgaactggaagcagcacatcattaggctttatgactgggtgtgtgttgtgtgtatgtaatacataatgtttattgtacagatgtgtggggttgtgttttatgatacattacagccaaattatttg

SEQ ID NO: 35380 - DNA, 396 bp, Homo sapiens
  misc_feature (1)...(396): n = A,T,C or G
cacttcttaccgtgtagtaaccttactacaattacagattttcaggagttgtttgctagtctctttcagtcaggtactaaaaaaaaaacaaaaaacaggctgggcgcgggggctcacacctgtaatctcaacactttgggaggctgaggtgggcggatcacgaggccaggagatcgagaccatcctggcgaacacggggaaaccccgtctctactaaaaaaatacaaaaaattacccgggcgtggtggcgggcgcctgtattcccagctactcgggaggctgaggcaggaaaatggcgtgaacccaggaagcggagcttgcagtgagccgaaattgtgccaccgcactccagcctgggtgacagagcgagaatccgtctcaaaaaacaacagcacn

SEQ ID NO: 35381 - DNA, 469 bp, Homo sapiens
  misc_feature (1)...(469): n = A,T,C or G
nttctgagaccactattgagtgtcgtggaattcgtttctcctgtgcttggttgtgtataatggagctaactcctaagcggtggggtgaatgtggccgccttagttctgaagctactccagttatgttctgtttcttcaagctgtgatccagaaagatttttgtgcccccagatgcctcttgataggagaggcaacatactccaaatagttgggttcttcagggaagctattacaaactcaggtgacttgttagagcactaacttggtcagagccaaatcctggcaaacgctgcctgaccttcactctgtggttggggcagtgagaaccactgaggtccaatgatgagacttggaggtctggatccagtctctctttgttttaatgtgacttaggtgctgtcaacattagcaagataatggaaatcacgacgccagtgggtgcttacctccctgctaggcatgcaggggn

SEQ ID NO: 35382 - DNA, 424 bp, Homo sapiens
  misc_feature (1)...(424): n = A,T,C or G
aactccggtggtaggggagcgcgctgctgtttagagccacgagttaccggagcgcctgattcctgcgccgaagtcagtggtggccgaaagtccggagtcgctgtaaaacctgagattgtgagccatggtggggagatcccggcggcgcggagcagctaagtgggcagctgtgcgagccaaggcaggtcccacgctcaccgacgaaaatggagatgatttaggattgccaccctcaccaggggacaccagctactaccaagatcaggtagatgactttcatgaggcacgatcccgggccgccttagctaagggctggaatgaagtacagagtggagaccaggaggatggcgaggaggaggaggaggaggtgctatccctagatatggacgatgaggacgacgaatatggagggaatgcggnggag

SEQ ID NO: 35383 - DNA, 502 bp, Homo sapiens
  misc_feature (1)...(502): n = A,T,C or G
tgggnncnnnnnnnatcgtgatcatcttcaggtggggaattccagatgggagagaggagatccccaaccacagccggcagaaacttgtaagagagaatagcccatcccacagccagggcagtacagggaagagagaagttggagagaaagaggaaggggaggtggactcattgcttgtctcgggttggtttcctggagtttggtgtagagcatgggcagctgcctcttgccagcagcagctggtcccccataatctcccttattccatttaacatcatcaggagcgtcttggtggaaagaaacatccagtttgggggctccaaacaaccacaggcaaggccaggtgtcaccagcatgggagtgcgacagcgaggccttgcccagaaaccagaagcagctttcaggctaggggtgggacactttcctctctgctccctaaaatgctagctgcaggcccctgagggctctgccagaagaggaagccacccccgtatcagctctg

SEQ ID NO: 35384 - DNA, 452 bp, Homo sapiens
caattcaggagggatggtcatgatggttcctggggctggctctgtgcctgctatccaaagaatccctctacctggagcagagatgcttgaagaagagcctctctacgtgaatgccaaacaataccaccgtattcttaagaggaggcaagcccgagctaaactagaggcagaagggaaaattccaaaggagagaaggaaatacctgcatgagtctcggcaccgtcatgccatggcacggaagcgtggtgaaggtggacgatttttctctccaaaggaaaaggatagtccccatatgcaggatccaaaccaagccgatgaagaagcaatgacacagatcatccgagtgtcctaaccccacgccatgtgatggagctgatcaagggcatgtttctcactgttccaggaaattgatcaactcttccaatgggacattgatgatcacattctgcccc

SEQ ID NO: 35385 - DNA, 496 bp, Homo sapiens
  misc_feature (1)...(496): n = A,T,C or G
ggggnttnnnttcgttagcactacantgtgncgnggcattcggaagacagagaagttcttgaaagctgagggatgtgtgggcaagaggtggatcgagcatgatctcagggttatgtcgaggaagggaagaaagagacagaggtcatgcataggcgtgtctgtgcaaactggaggactccttccaacttcctggaacaaagcgacatcgccagcagcaagctggcatggagtggttgaggtctgggggccaggccacatggctggagaggaatttcagggagcatagcatcgggaggatgctacatatccagggactccctcctggccttgctgtgtcacttcacaatgtgacagtccccatgcatgcccacaggccaggcccagtcacagctgggcttccacaggtcagaatatgggacaggacatggtcagggagaggaccctgtgagttggtgacatatatgtggcagagatggtagtgatcagctgcttcagc

SEQ ID NO: 35386 - DNA, 444 bp, Homo sapiens
  misc_feature (1)...(444): n = A,T,C or G
agggcnnnnnnnnnattgattcgccgatccctagtccagtgcggtggaattcggcttccatgggcctaatttacagatagggcggtatttctgccccttaaccgaaagtgggatacagaggacgacggtgttaggcgcctgtgtaggagtaaaatgtgtttattttgcattcaacgagagctcctgcattgcagctattttgcatatgatttgcatcttacgaagaatttgtggcaaaaaaaagctgggcgtgcgccgtaggaacctcctgctgagacgcttccggtagcggcgcgtgacccgacaggtctttcacctacctacctcagctcccacaaacacgagaagttccagcaagttcgccacttccggttctcctggctatccaatagcatcgagtggagcatccccggaagtgaggcagcggaggacgacctttttccg

SEQ ID NO: 35387 - DNA, 439 bp, Homo sapiens
  misc_feature (1)...(439): n = A,T,C or G
ggggtnnnnnnatcgctgaccttacttagtgcggtggaattcgccagtactgctgctactacagcggcgcgcatcagggacactcggtgtgcgacgtggagatccgaaggaatgaaatccggaagatgctcatgaagcagcaggaccggctggaggagcgagagcaggacattgaggaccagctgtacaaactcgagtcagacaagcgcctggtggaggagaaagtgaaccaactgaaggaggaagttcggctgcagtacgagaagctgcaccagctgctggacaaggacctgcggcagacagtggaggtcctagacaaggcccaggccaagttctgcagcgagaacgcagcgcaggcgctgcacctcggggagcgcatgcaggaggccaagaagctgctgggctccctgcagctgctctttgataagacggaggatgt

SEQ ID NO: 35388 - DNA, 445 bp, Homo sapiens
  misc_feature (1)...(445): n = A,T,C or G
agggggntnnnnatcgatctcactacttcgtgcggtggaattcgcagcttctaacttcagtaaggcgcatggttttgacccttacccagcaaaatgatgagagcaaagagtttgtaaagttctttcataaacaacttggaagtatattacaggattcactggcaaaatttgctggcagaaaactgaaagactgtggagaagatcttcttgtagagatatctgaagtgttgttcaatgaattggctttctttaagcttatgcaagatttggataataatagtataactgttaaacagagatgcaaaaggaaaatagaagcaactggagtgatacaatcttgtgccaaagaggctaaaaggattcttgaagatcatggctcacctgctggagagattgatgatgaagacaaagacaaggatgaaactgaaacagttaagcagactca

SEQ ID NO: 35389 - DNA, 482 bp, Homo sapiens
  misc_feature (1)...(482): n = A,T,C or G
aggcacgggggcccgcaatcgtagacccatgagatcatcgcgcagngcggcggaattcgtgtgtcttctgatcaaaatcatttccgaggagaaattgaggaaaccatcactgaaagctttggtaatgatcatagcaccttggatgggtattccagaagaaccaccttgtcttcaaaaatgtatcacaccaaaggacaagaaggttctgtttgtctccggtcatcagactgtgcctcaggattgtgttgtgctagacacttctggtccaagatctgtaaacctgtcctgaaagaaggtcaagtgtgtaccaagcataggagaaaaggctctcatggactagaaatattccagcgttgttactgtggagaaggtctgtcttgccggatacagaaagatcaccatcaagccagtaattcttctaggcttcacacttgtcagagacactaaaccagctatccaaatgcagtgaactccttttatat

SEQ ID NO: 35390 - DNA, 453 bp, Homo sapiens
  misc_feature (1)...(453): n = A,T,C or G
natcgaagactgaaggcactgcggcggaactctaagtgctagggctggtcacacacaaccaaccgaaaaagactagagggattagtacaaactcctcttatacagaaggcaaatctgaggtttcacataagcctggaaccaagactattcagttggctacataaagagattatcctagactgggcctgctcattctaggtcaccacattttccatctccaaatagccaggccctctctccctcaagaaatgcccagatgtatgaaattcatcagtgcctattggtcttccagaattttccatcttccgtatctcccaggcatgagactaccaagtttgtttgttttctttccaatttgggaatttatacttcagtatgggtgcaacgcagttatgtttccagagaacatctagaagtggctggaaaccagaagctggggattccagggacccn

SEQ ID NO: 35391 - DNA, 452 bp, Homo sapiens
  misc_feature (1)...(452): n = A,T,C or G
natcgagaactgaaggcagtgcggnggacttcttcaatctggcccctctaggccgacgaagagttcagtcccaatgggcctccactaggggaggccataaggagcgccccacagtcatgctgtttccctttaggaatctcggctcaccaacccaggtcatatctaagcctgagagcaaggaagaacatgcgatatacacagcagacctagccatgggcacaagagcagcctccactgggaagtctaagagtccatgccagaccctggggggaagggctctgaaggagaacccagttgacttgcctgccacagagcaaaaggagtgagtggaacagagttgcttcttactaggagcacattctttgcctgccttcccttcatcctatcctctttgcttgctctcacctcaggaattgcttggattgctacatggaccccctgagactatcatt

SEQ ID NO: 35392 - DNA, 446 bp, Homo sapiens
  misc_feature (1)...(446): n = A,T,C or G
agggggtnnnnttcgctcgcgatccttagtccgtgcggtggaattcctccccccagctcagccccaggcagaagtcaggcccgctctgcacctcgtgctgtgcctggcccgtgtgttcccctcacagtgacgcacagccgtcctgtggggagggagggctctgggaaaagacccccttcttgagtgttccccatcggtttgtccccagggctgcgctggcctcggcacaccagtgccacccgctgccccggacgctgagcgtcctgaagagcacgccgcaggtacggggcatgcacaccatcatcagggacaaggagaccagtcgcgacgagttcatcttctactccaagagactgatgcggctgctcatcgagcacgcgctctccttcctgccctttcaggactgcgtcgtacagaccccgcaggggcaggactatgcgggcaag

SEQ ID NO: 35393 - DNA, 457 bp, Homo sapiens
  misc_feature (1)...(457): n = A,T,C or G
ctcgaccatcgatgnatcactagcccagngcggtggaattccacccgacccctggctcgagacctcctccagctccccagcagagccggcacagccaggggcctgccgccgagacggctactggttcctaaagctactgcaggcagaaacagagcggctggaaggctggtgctgccagatggacaaggagaccaaagagaacaacctctctgaagaagtcttaggaaaagtcctcagtgctgtgggcagtgcccagctactgatgtcccagaaattccagcagttccggggcctctgtgagcaaaacttgaaccctgatgccaacccacgccccacagcccaggacctggcagggttctgggacctgctacagctgtccatcgaggatatcagcatgaagttcgatgaactctaccacctcaaggccaacagctggcagctggtggagacccccgag

SEQ ID NO: 35394 - DNA, 446 bp, Homo sapiens
  misc_feature (1)...(446): n = A,T,C or G
agggggtnnnntttgctcgacgtccttagtccgtgcggtggaattcgaatcattttggaaactaaatcgttccccagggtcggaccgatacctggagagccgcgatgcctctcgactgagtggccgggacccctcctcatggacagtcgaggatgtgatgcagtttgtccgggaagctgatcctcagcttggaccccacgctgacctgtttcgcaaacacgagatcgatggcaaggccctgctgctgctgcgcagtgacatgatgatgaagtacatgggcctgaagctggggcctgcactcaagctctcctaccacattgaccggctgaagcagggcaagttctgaaccaggagaggcagcctagacaaccaagtggcagcaggtgggggcattcttctaagaatgaggggcatcagcccaccccaggcacctcagtggggttccg

SEQ ID NO: 35395 - DNA, 385 bp, Homo sapiens
cctggagacacagccgcagagcagccccttctcatgcatggacctcacctacgtcagcctgctactccaggagttcggctttcccaggagcaaagtgctgaagctcactcggaaaattgacaatgttgagaccagctgggctctgggggccatttttcattacatcgactccctgaacagacagaagagtccagcctcatagtggccgagccatccctgtccccgtcagcagcgtctgtgtgtccgcacccaccctcctgtcctggacgtgacttcatcctgaggagccacagcacaggccgtgctggcactttctgcacactggctctgggacttgcagaaggcctggtgctgccctggcatcagcctcttccagtcacatctg

SEQ ID NO: 35396 - DNA, 395 bp, Homo sapiens
gcacactggagagatatctcataaatgtaagatatgtgggaaagccttttattctcccagttcacttcaaacacatgaaaaactcacactggagagaaaccctataaatgcaaccaatgtggtaaagcctttaattcttccagttccttccgatatcatgaaagaactcacactggagagaaaccttacgagtgtaagcaatgtgggaaagccttcagatctgcctcactccttcaaacacatggtaggactcacacgggagagaaaccctatgcatgtaaggaatgtggaaaaccatttagtaatttctctttctttcaaatacatgaaaggatgcacagagaagagaagccgtatgaatgtaagggttatgggaaaacattcagtttgcccag

SEQ ID NO: 35397 - DNA, 494 bp, Homo sapiens
  misc_feature (1)...(494): n = A,T,C or G
ntttgtttgacatcactagtccagcgtggaggaattcgatgctagtcacacagtggataaagcagtggagctaagatttggattcaggtgctcagacttcaaatcacctatttagcaactactgaaacccaggggtcattgagtggaaggtacccagtaggaagaatgctgtcacagttaactgggtctatagatgacagtgctcaacctctgagttatccaaaaggcacagcaaagaagcaaaatgtttcccctaaattccccagatcatttaatcccagtcccactattgtatttttttaatttttttttttttttttgtaaaaataaggtctcaccatgttgcccaaactggacttgaactcctggcttaaagcaatttgcccacctccgcctcccaaagtcctgggatttataggcatgaaccaccgcacctggcctccccaccattttattttctcccggggttatcccacccgggaataagagagggg

SEQ ID NO: 35398 - DNA, 384 bp, Homo sapiens
gcatgactgacttcacatgctcagctttctcagccttttgtttattttgttgtccttagatttccctgttgtaaaaggggcaagaaaagtaactcatcatctctaacacaccatggcagcttagccaggtagtcttagtggtggtgtttaggcataagatatgctgatcatcagtctcaggccacagtttccttcactaatcgtccagcttgagtgttctgttctcttcctgcccatttccttgaacctcctgctctagccttggcggagggagagtgctatttgcttttgttctccctctgtcttaagaaaagccatctttaatatagttcttcaccactgttggggttgttttgtgattttttttttcttccgaagaactcc

SEQ ID NO: 35399 - DNA, 465 bp, Homo sapiens
  misc_feature (1)...(465): n = A,T,C or G
cttcgatgatcattagtccagtgcggtggaattcggagaaggaggtgtgaaggtaccagcttgcaggttcagggagaggtgactgatgagtcagaaggcagcaggggtgagggacgacactggctttggatattgtcagggtggaggcaaagtgattggtgagaactagggtttaaggccctcaaaccacatctaaaaacatcaaggcaaatcctagaaataatttgaaatagatgatgaagatttttctaggagaacatgtgtgtgtattccatgtaaatactgcgcgctaatcaattgcacaactggagctgctcacgtaagtactctttacgaaaggatacagcatttgtcccttgattatagtaaaaaatatagtattcatggtagaaaatgtgggaaatacagaaaaggatttagaanaaaggaaaatcttatcaggaacagtctncgtatcattntgtg

SEQ ID NO: 35400 - DNA, 446 bp, Homo sapiens
  misc_feature (1)...(446): n = A,T,C or G
aggggggnnnnnaattgctcgacgtccctagtccgtgcggtggaattcgggagatgcaatatttagcatttcctcaaactttttttggccatgaaatccaccacccccctcctttttcagagcatttcatgaagttcacatttcaaataatacattttgaaaaacatttatcttgtctaattgaagctcaaagagatagagtcaatgacttttcaaagtcaggtagcagatagttttaaagctgcaagtactgataagtgtgagccattagttaattcgcatttataaagaagtggtctgtcacttttggcaaatgtcttgacatctgttgctctacagttgtcaactagaaaattaggcatagagtttcacattattataagcatgttttcacacaaaaacatgtacattgatgtttattgcaattttatgtgtaataaccaaaa

SEQ ID NO: 35401 - DNA, 441 bp, Homo sapiens
  misc_feature (1)...(441): n = A,T,C or G
agggggnnnnnnnntttgatcgacgatccctagtccagtgcggtggaattcccggcgtctaggggagcgaaggctgaggtggcagcggcaggagagtccggccgcgacaggacgaactcccccactggaaaggattctgaaagaaatgaagtcagccctcagaaatgaagttgactgcctgctggctttctgttgactggcccggagctgtactgcaagacccttgtgagcttccctagtctaagagtaggatgtctgctgaagtcatccatcaggttgaagaagcacttgatacagatgagaaggagatgctgctctttttgtgccgggatgttgctatagatgtggttccacctaatgtcagggaccttctggatattttacgggaaagaggtaagctgtctgtcggggacttggctgaactgctctacagagtgaggc

SEQ ID NO: 35402 - DNA, 439 bp, Homo sapiens
  misc_feature (1)...(439): n = A,T,C or G
agggtannnnnnnattgattagcactcgctcgtgcggnggaattctgcacacatggtactaagcaaagccaacagccagccctcagcaaggagagcacctatcagccatccaggaatgagtgaaccagggaactttggtgggaatagcttcatgccagcaaatggcctcactgtggcccaaaaccaggtgttgaatttgattaaggcttgtccaagacctgaagggttgaactttcaggatctcaagaaccagctgaaacacatgtctgtatcctcaatcaagcaagctgtggattttctgagcaatgaggggcacatctattctactgtggatgatgaccattttaaatccacagatgcagaataactggatctaactgggtacctgagatattttacagctggacctactttcacaatctgttgtctccagctctgn

SEQ ID NO: 35403 - DNA, 504 bp, Homo sapiens
  misc_feature (1)...(504): n = A,T,C or G
agcncnatnnnnnnaatcgttgaacatcgttcgtgtggtggaattcctggttttctgtaatttgtactttcccacactataattggcttctgttttacaaaatggtgggtggctttttcttttttgtacgtgtacaggagtctgctggtacgagaggccttcctctttctgtttttaaaaaaagttttactgccatattggcattccattccctgttgccatcctcactgttacctgttttgggtttctggtctactttgactttcaaagtacctccagcctcctcatacgcacagcttttggatgacctcagcttgagtttctccatatgtgcatgtacatctagcattctgcctacagttcagacagaagtcacaaaaaggccttcaactcaccaaaggtaaatatctgtatctattaggacattttttacatagacttcagttgagatgtatacttagcaaaattatttttaaattgaaacagcacagtaaatacttaata

SEQ ID NO: 35404 - DNA, 479 bp, Homo sapiens
  misc_feature (1)...(479): n = A,T,C or G
cccccccccccccccnccttagatgacatagataaccgtcgnggaantccaaccacagacaacaagtgcagcatcaagacggccgtggccaagaacatgctggacctcatcactgggcagaagctactggaggcccaggcggccacagggggcatcgtggacctgctcagccgagagcgctactctgtgcacaaggcgatggagaggggcctgatcgagaacacctccacacagaggctgcttaacgcccagaaggccttcaccggcatcgaggaccccgtcaccaagaagaggctctcggtgggcgaggccgtccagaagggctggatgccccgggagagcgtgctcccacacctgcaggtgcagcacctgaccggggggctcatcgaccccaagaggacaggccgcatccccatccagcaggccctcctctccgggatgatcagagaagagctggcccagctcctgcaggacgagtc

SEQ ID NO: 35405 - DNA, 484 bp, Homo sapiens
  misc_feature (1)...(484): n = A,T,C or G
gggcccggccnttcgaaaccctatcgaagaccctaggcagtgaggtggaattcccatggcaccgggcttggacctcatcagtgtggagtggcgactgcagcacaagggcaggggtcagttggtgtacagctggaccgcanggcaggggcaggctgtgcggaagggcgctaccctggagcctgcacaactgggcatggccagggatgcctccctcaccctgcccggcctcactatacaggacgaggggacctacatttgccagatcaccacctctctgtaccgagctcagcagatcatccagctcaacatccaagcttcccctaaagtacgactgagcttggcaaacgaagctctgctgcccaccctcatctgcgacattgctggctattaccctctggatgtggtggtgacgtggacccgagaggagctgggtggatccccagcccaagtctctggtgcctccttctccagcctcaggcaaagc

SEQ ID NO: 35406 - DNA, 494 bp, Homo sapiens
  misc_feature (1)...(494): n = A,T,C or G
agggnntnnnnatgatatccctacgtagtgtcgnggaattcgcaccgtgtcatcctcatcatacaatgcctgatcatgctgctcctgtcaccctccacgattccacagaccaggacattccatgtgcctcatggcactgccacctggccctttgccctattttctgttcagttttttaaaagtgttgtaagagactcctgaggaagacacacagtttatttgtaaagtagctctgtgagagccaccatgccctctgcccttgcctcttgggactgaccaggagctgctcatgtgcgtgagagtgggaaccatctccttgcggcagtggcttccgcgtgccccgtgtgctggtgcggttcccatcacgcagacaggaagggtgtttgcgcactctgatcaactggaacctctgtatcatgcggctgaattccctttttcctttactcaataaaagctacatcagactgatgctctttctccagattcttagtctc

SEQ ID NO: 35407 - DNA, 457 bp, Homo sapiens
  misc_feature (1)...(457): n = A,T,C or G
natcgagacctggagcccattgcggnggacttcaaaggccttacactctgaccgtcctccttctgcatctcagcccagaggggaacttatgtgttataaggccaagacattccagatggacgattacagtctctgtgggttgataagtcacaaggaccagcacagtccaggctttggagagaatcaccttgtgcagctgatttaccaccaaaatgcaaatggttcctgggatctgaatgaagatctagccaagatcctaggtatgagtttggaagaaataatggctgcacagcctgccgagcttgtggattcctcaggctgggccaccatcctggccgtgatctggctgcacagcaatggtaaggacttgaagtgtgaatgggagcttctggaaaggaaggccgtggcctggatgcgtgcccatgcaggctccaccatgccttcggttgtgaaagct

SEQ ID NO: 35408 - DNA, 448 bp, Homo sapiens
  misc_feature (1)...(448): n = A,T,C or G
gggggggnnnnnnnaattgaatcgacgatccctagtccagtgcggtggaattccttcagagagctgtctagaactcgagaatcatggcaccacagacgtgaaatggcatctgtcatctttagcgccaccttatgtcaagagatggagcctcaccacactgcccaggctggtctcgatctcctgacctcaagcaatcttcccacctcagcctcccaaagtgctgggattacagggagttgatgaaagtggagatgtttttagagctacctatgcagcattcagatgttctcctatttctggtctgctggaaagccatgggatccaaaaagtctccatcacatttttgcccagaggtaggggggattatgcccagttttgggatgttgaatgtcaccctcttaaggagcctcacatgaaacacacgttgagattccaactctctggacag

SEQ ID NO: 35409 - DNA, 442 bp, Homo sapiens
  misc_feature (1)...(442): n = A,T,C or G
aggggtnnnnnnaatcgattgcattacttcgtgcggtggaattcgaggctgtgtccaccatggcctggactcctctcctcctcctgttcctctctcactgcacaggttccctctcgcagcctgtgctgactcagccaacctccctctcagcatctcctggagcatcagccagactcacctgcaccttgagcagtggcttcaatgttggtacctacaggatatactggtatcagcagaagccagggagtcttccccggtttctcctgaagtataaatcagactcagataaccaccagggctctggtgtccccagccgcttctctggatccaaagatacttcagccaatgctggccttttactcatttccggactccagtctgaagatgaggctgactattactgtactatttggtatggtggcacttcggtgttcggcggagg

SEQ ID NO: 35410 - DNA, 442 bp, Homo sapiens
  misc_feature (1)...(442): n = A,T,C or G
cgggcngnnnnnaattgatcgcagtccctagtccgtgcggtggaattcctcgcccagctggccgaggcggggcaacactaaggtgctcttagaaacactaatgttcctctggggcagcccccacctccgtcctgacccgacgggggcccggcccactgcctaccctcgagtcccgcagccttaacaggatgggatcgagggtccccatggggtggctcatagataggaccctggttttaaatccctcccagcctggtgctggtgatgggccctggccctactccagggccaatgcacccccgcctcacacacgcactccttctcctcaaggccagggcagagggcctcaccgcctcccgggcctgctgtcagcttgcagcccggggacagaggccagctgggatctgcctgaggacagagaacatggtctcctgcagggccc

SEQ ID NO: 35411 - DNA, 439 bp, Homo sapiens
  misc_feature (1)...(439): n = A,T,C or G
aggggtttnnnnaactgatgctttacttcgtgcggtggaattctttcagaccagtgcaatcagcagagacattgatactgctgccaaatttattggtgcaggtgctgcaacagtaggagtggctggttctggtgctggtattggaacagtctttggcagccttatcattggttatgccaggtaatcatttctatccctaaataagttaagagcatgcttgcagtagttggaaacttagctactgaaataatagctactttgcattaagtgcttactctgtgtcttgcattatatttaaagggctttgtatgcattatctcacttaattctcataacaccatttgggatgttatgagaataacatctatgaaggactagagacacagaggccacattacttgcccaggtcatagctagtaaatgtcagaaaatgaatttt

SEQ ID NO: 35412 - DNA, 492 bp, Homo sapiens
  misc_feature (1)...(492): n = A,T,C or G
nttatcgagatcactagtccaggggggnggaattcggaaaatggaaggtcagaattcccagagtcctcaatgtttcaaaacatgctcagagcaaaatggttatgttctcacattgtcaaatgcacaaccagttctgcaatatggtaatccttatgcatctcaggaaacaagagatggagcagatggtgctttttacccagatgaaatacaaaggccacctgtcagagtcccctcttggggactggaagacaatgttgtctgcagccagcctgctcgaaactttagtcggcctgatggcttagaggactctgaggatagcaaagaagatgagaatgtgcctactgctcctgatcctccaagtcaacatttacgtgggcatgggacaggcttttgctttgattccagctttgatgttcacaagaagtgtcccctctgtgagttaatgtttcctcctaactatgatcagagcaaatttgaagaacatgttgaaag

SEQ ID NO: 35413 - DNA, 441 bp, Homo sapiens
  misc_feature (1)...(441): n = A,T,C or G
agggggtnnncctgctgtcgtccctagtgcggggaatcagctgaagcctctggacctttgcagaagttagagattcagtgcccccctttcttaaaggggttccttaacaaccacaaaaatccttatttctgcagtggcatagaatctgttaaaatttaattagaatcacaaatttatctcagaagctttttaacagttggtgaaatgtgcttgtccaacaaagcatcctatcagggacgttcccatacacatttgacctggacagccttttgcaggtgaatagccgcatgtctgacataaagaaagctttatttgtattttactactgtttgggcaattttgatatataactggttacaaacagagccttactatttattagcggggaaatgattttaagaccgtccttttcagtatttaattctgacagatctgcatcct

SEQ ID NO: 35414 - DNA, 452 bp, Homo sapiens
  misc_feature (1)...(452): n = A,T,C or G
aggtnnttnnnnttcgctcgtcgtccactagtgcgtgtggtggaattcttaggtgcccgagctactgagggtctaagtccgggcagccgaagagtgtggttagcaagatgaacaaagatgcgcagatgagagcagcgattaaccaaaagttgatagaaactggagaaagagaacgcctcaaagagttgctgagagctaaattaattgaatgtggctggaaggatcagttgaaggcacactgtaaagaggtaattaaagaaaaaggactagaacacgttactgttgatgacttggtggctgaaatcactccaaaaggcagagccctggtacctgacagtgtaaagaaggagctcctacaaagaataagaacattccttgctcagcatgccagcctttaagattgaattagattgtgttgttgtggttttatttctgaaagtaaaacttgccat

SEQ ID NO: 35415 - DNA, 472 bp, Homo sapiens
  misc_feature (1)...(472): n = A,T,C or G
ntcgagnccntttcgtagaccctagtcagtgtggtggaattcccggcagagtacagctccatggtgcggcccatctgcctgccggacgcctcccatgtcttccctgccggcaaggccatctgggtcacgggctggggacacacccagtatggaggcactggcgcgctgatcctgcaaaagggtgagatccgcgtcatcaaccagaccacctgcgagaacctcctgccgcagcagatcacgccgcgcatgatgtgcgtgggcttcctcagcggcggcgtggactcctgccagggtgattccgggggacccctgtccagcgtggaggcggatgggcggatcttccaggccggtgtggtgagctggggagacggctgcgctcagaggaacaagccaggcgtgtacacaaggctccctctgtttcgggactggatcaaagagaacactgnggtataggggccggggccacccaaat

SEQ ID NO: 35416 - DNA, 492 bp, Homo sapiens
  misc_feature (1)...(492): n = A,T,C or G
ntcatcgacgatcctagtccagngtggtggaattcgggacagctagtggccctgctgggcttcacacacggtgtcctccctaggccagtgcctctggagtcagaactctggtggtatttccctcaatgaagtggagtaagctctctcattttgagatggtataatggaagccaccaagtggcttagaggatgcccaggtccttccatggagccactggggttccggtgcacattaaaaaaaaaaaatctaaccaggacattcaggaattgctagattctgggaaatcagttcaccatgttcaaaagagtcttttttttttttgggaacttttggccccaggtgggagggccggggaaaaatctcgcttaattgaaccttttgcctccgggataaggggggttttcttgcttgggcttccaaataaatgggaatatgggggtgtccccactttgccgggttagtttttgttttttaagtgaaaccggggttcc

SEQ ID NO: 35417 - DNA, 441 bp, Homo sapiens
  misc_feature (1)...(441): n = A,T,C or G
agcggtnnnnnnnaatcgatgatcactactcagtgcggtggaattcccccggttgaaccggcggttcagtgtaaaagggccggttaaaaccggttaacaaccctgaatggggcttttaacttgcaaccattaggtggttggcccttcccccgggctttcttgggcctggaaaggggcccttcccctggccttttcttataaaaagaagaaaatgggttctaatggctgaataaggggcattttaatatgggtgcttttttttattagtaaaaatgtaaatgccaattttctatttttcttctccccatcctgatacccatatcagtgtgatcttaaagtgcctgttttccttagtcaccttttagaacccaaagtttatgtcttttttaaattaatatcacacacaaaatgatatcatttcagtgatggnatcaggcagtt

SEQ ID NO: 35418 - DNA, 506 bp, Homo sapiens
  misc_feature (1)...(506): n = A,T,C or G
tggnnnntnnnnnnnaatcgtgatctctacttagtgtgcgggaattcgcttcaccagtttttctactggctccttctttgaactggatggacgtccattctgtgagctccattaccatcaccgccggggaacgctctgccatgggtgtgggcagcccatcactggccgttgtatcagtgccatggggtacaagttccatcctgagcactttgtgtgtgctttctgcctgacacagttgtcgaagggcattttcagggagcagaatgacaagacctattgtcaaccttgcttcaataagctcttcccactgtaatgccaactgatccatagcctcttcagattccttataaaatttaaaccaagagaggagaggaaagggtaaattttctgttactgaccttctgcttaatagtcttatagaaaaaggaaaggtgatgagcaaataaaggaacttctagactttacatgactaggctgataatcttattttttaggcttctatacag

SEQ ID NO: 35419 - DNA, 493 bp, Homo sapiens
  misc_feature (1)...(493): n = A,T,C or G
atttgtcgtacatcactaggccagcgnggnggaattcccttctggcaagcctgaaggcctgaactatgcctgtctcactcacagtggatatgtagatgggtctgattaatagcgttgtttgggaaagagagagttgagataaacactctcattcagtaattactgaaagaaaactctgctagaatgataaatgtcatggtggcctataactccaaataaacaatgcaacgatcccgatttctaatcttggttctgagagccatttggtttcagttgtagcaatccccataccagctgcctgactttcagtataattatgagatgaacactaagcatgtggaaagcttatgaagactcacaagtctggaagggaaacgctgctctcccttctcccttgaggtgctttaggctcttacccacctttcagtttgggctgtaataaaaatatcttggccacatgtttagagacagaataggtgtgttcagcgatatn

SEQ ID NO: 35420 - DNA, 453 bp, Homo sapiens
  misc_feature (1)...(453): n = A,T,C or G
nttgagatcgataggcagtgcggnggaattcggcgtggccaagatggccgcgtgtgggatcctcgggtaccgggagcgaacgaggaggttctggctcagtgcatccactctgggagagcgtggacctggttcctgggggcgatcgacagtcacccatcaacattcggtggagggacagtgtttatgatcccggcttaaaaccactgaccatctcttatgacccagccacctgcctccacgtctggaataatgggtactctttcctcgtggaatttgaagattctacagataaatcagctgcacttagtgcattggaacgcagtcaaatttgaaaactttgaggatgcagcactggaagaaaatggtttggctgtgataggagtatttttaaaggaaaattctcagtctcccttgaagaagtgaagcctccttctttatgcactggccactgtc

SEQ ID NO: 35421 - DNA, 455 bp, Homo sapiens
  misc_feature (1)...(455): n = A,T,C or G
natcgatgatcgatagccatcgcggnggacttcggaggctgatactggggcctctgggtgccactcccatccggaagagcagccgaccatcatctttccttccagacacggcgccctggctgagctctgcccgcctggaggctcccacaggatggccctggggactgctgctgcactcgggtcgaatgtcatcaggaatgagcagctgcccctgcagtacttggccgatgtggacacctctgatgaggaaagcatccgggctcacgtgatggcctcccaccattccaagcggagaggccgggcgtcttctgagagtcagggtctaggtgctggagcgcgcacggaggccgacgtaaaggaggaggccctgaggaggaagctggaggagctgaccagcaacgtcagtgaccaggagacctcgtccgaggaggaggaggccaaggacgaaaaggcat

SEQ ID NO: 35422 - DNA, 476 bp, Homo sapiens
  misc_feature (1)...(476): n = A,T,C or G
gatgggggccncnncaattgatnactgagnatcactagccagngcggtggaattccagtagtattggcattcccattgctgtgcctacaccttcgccacccactattggacttgttgctgatagtccaactccaccgccaccacctccaccagatgacattcccatgtttgatgactctccacctcccccaccaccaccaccagtggattatgaagatgaggaggctgcagtagttcagtataatgatccatatgcagatggggatcctgcttgggcccccaagaattatattgagaaagttgttgcaatatatgattatacaaaagacaaggatgatgagctgtcatttatggagggtgcaatcatttatgttataaagaagaatgatgatggctggtatgaaggagtctgcaatcgagtgactggtctgttccctgggaactatgttgaatcaatcatgcactatactgattan

SEQ ID NO: 35423 - DNA, 478 bp, Homo sapiens
  misc_feature (1)...(478): n = A,T,C or G
agtggggnnnnnnnanaaactgagacctgaagnacatgcggnggaantccccggctcgagcggccatcatcaaacaggacagagttggaagaggagactgggaggttgcaagaggggtcacataccagctcaggggagaatggagtactgtctcagtttctaaccactctgtgcaagtaagcatcttacaactggctcttcctcccctcactaagaagacccaaacctctgcataatgggatttgggctttggtacaagaactgtgacccccaaccctgataaaagagatggaaggagctgannaaaaaaaaaaaaaaaaaaaaaaaaaaaaaaaaaaaaaaaaaaataatttttggggggnttnatttatgaaataaaaaaaaaanataatnnnttggntggggtgtttttgttattgggggtgntggaaagntgnttgtgaactatgttgtgtttataatgaagacaacctttttn

SEQ ID NO: 35424 - DNA, 453 bp, Homo sapiens
cttgatcgcgtccactagtccaggtggggaattcgttaatagttaattttttaataaaattttctctacgttctatatgcaattgttatatatctatttgaatagctgaaggactaaaatacttttttaagagataacttcaggaaaccattatattttactatctgcatgctgttaactgtggtacactgtgaaatatgttgattacaaacccattcattacatagtataaggaattcacagtatattgactatatagtgtctaatgatcttgggcagatactgtcaaacttacaatatctatatagatgtaggtctttttaaatttacctagtcattcttctatcatgtatattgatgctgaaagaggaactggtcagctcctctggacaacaaattcttagtctataatattaggagacatcttctgttttgcaaatgtctgtgaatctg

SEQ ID NO: 35425 - DNA, 441 bp, Homo sapiens
  misc_feature (1)...(441): n = A,T,C or G
aggggttnnnnnnaatcgatgatcattctacagtgcggtggaattctgggaagtaggagaaagaacagggagagaagtaggtagggtgtgaagagaagtataattttatctcatttctttctctgagagatctaagaagtcaagagacacaagagatccagtgtaacttgattttattaatgtttgcattctgtccttcatgtaaccttacgctggagtattggacctggatcaccatcctctctgtcagaattgcgtctcactgatgaacattttcatttcccaggagtggttgatcatgcatcttggcaaatttccctcatttctctttacagtccccattcctgacctttgagaaacagtcatcaaagtgtagaagtaaagtcttttaaaatgcctttccagatggacccttagaactctttcaaagatatttgtaaa

SEQ ID NO: 35426 - DNA, 439 bp, Homo sapiens
  misc_feature (1)...(439): n = A,T,C or G
ggggggnnnnnntttgatcgacgatccctagtccgtgcggtggaattcgccgccgcctccgccaagctggccttcggcagcgaggtggtaagagacgtcggggactgaggcctcttcccttaccagggacctaaaaccttttctccggttgggctagttcgctctcggggaagaactacacctcctacatccaccctctacctctcattttaagtcccttgtgcctgagcatttctctccacgtgactcttaaggtgagcatgggtttatgcgtcttaggcattattgtgatggcgagcaccaattctctgatgtggaccttctttagccggggcctcagtttctccatgtcttcagccattgcatctgtcacagtgactttttcaaatatcctcagctcggccttcctgggctatgtgctgtatggagagtgccagga

SEQ ID NO: 35427 - DNA, 459 bp, Homo sapiens
  misc_feature (1)...(459): n = A,T,C or G
natcgatgactattagtccagtgcggtggaattcatccatccctacagggttcagcagggcctacaggaggggcagtgagagaacagaccccaaaaagaaaggggactccatgactgaccaccttgaggggggccaggctgcgggccccgttcatcttttttcattctcaggtcgctgatttcttggagcctgaaaagaaagtaacacagcagggatgaggacagatggtgtgagtcagtgagtgagtgacctgactaatagcctgggagggacagggcaggttttctgcagagcacggaagattcagctgaagtcagagaggtgaagccagtttcccagggtaacatagtgaggcactgaaagaaaggagactgcactggagcccaggtccccgggctccccagagctccttactcttcctcctcctcagcagccttgagaccccacaacctccagcc

SEQ ID NO: 35428 - DNA, 483 bp, Homo sapiens
  misc_feature (1)...(483): n = A,T,C or G
aggaagcggggccngccactgaganccttgagattctgaggacangctgcggaattcgctcagagcacttgtgtctgcattccagataacattcaggacctgtgttaaaagctgtggtcactgtggctgtagaccatgaactggcagtgggggtgtccagggcggtgcttgagaacgtcagactggctagtttaattccctggcgcagatacgcataggaccaacagggtcaccaagcagacagggagcccgcgagaatcattcaaaacatccccagccacagagatggatccagtttcctggtcatccccttagcagttcacaagttcctggcaaatgttccaaagcaaaaagcgattgcaattagcatccagttcctgcagcctggtgctctgccctgcacgtcagggttggcatccacccagatccagatggaagggaaacttctctcttctcctttgcctcctcttccctcaccagagc

SEQ ID NO: 35429 - DNA, 456 bp, Homo sapiens
attgttgacgtccttagtccgtgcggtggaattcgacacagggaggaaggacccagtgccctcaggcgtccatctgatgcatgggaccaacataaggcaggcagggatacaaggcagtctggaaagaagggaaggcaggagtttcagtcttgggctcttgactcctcactgttgtctagagatggagccagcaggctggtagcctggcagcctacatctcccctcagcctctcctcactatggccccagtgccttgaggcccaggccagggcagccagtggctctagctcagggaaagccaggcccacctgccctatcccctcccttgctcctgaggccaaagccagagactcgaacagcctccccaccaccaccagcatatgtcaaggagcacttgcaggcagaatgggaggaggacatggagctgatggagtccaggctgtgcaagcccctgag

SEQ ID NO: 35430 - DNA, 450 bp, Homo sapiens
gtcttcttttggggggaatacgtcgcaaaactaacaaatctccaaaccccagaaattgctgcttggagtcgtgcataggacttgcaaagacattccccttgagtgtcagttccacggtttcctgcctccctgagaccctgagtcctgccatctaactgtgatcattgccctatccgaatatcttcctgtgatctgccatcagtggctcttttttcctgcttccatgggcctttctggtggcagtctcaaactgagaagccacagttgccttatttttgaggctgttctgcccagagctcggctgaaccagcctttagtgcctaccattatcttatccgtctcttcccgtccctgatgacaaagatcttgccttacagactttacaggcttggctttgagattctgtaactgcagacttcattagcacacagattcactttaatttcttaa

SEQ ID NO: 35431 - DNA, 438 bp, Homo sapiens
  misc_feature (1)...(438): n = A,T,C or G
agggtnnnnnnnatcgctgaccctcgnccgtgcggtggaattcctcaaaatgaagaaatccgagcagttggcagactaaaaagagagcggtctatgagtgaaaatgctgttcgccaaaatggacagctggtcagaaatgattctcttgtgacaccatcgccacaacaggctcgggtctgtcctccccatatgttacctgaagatggagctaatctttcctctgctcgtggcattttgtcgcttatccagtcttctactcgtagggcataccagcagatcttggatgtgctggatgaaaatcgcagacctgtgttgcgtggtgggtctgctgccgccacttctaatcctcatcatgacaacgtcaggtatggcatttcaaatatagatacaaccattgaaggaacgtcagatgacctgactgttgtagatgcagcttcn

SEQ ID NO: 35432 - DNA, 438 bp, Homo sapiens
  misc_feature (1)...(438): n = A,T,C or G
aggggggnnnnnaggatcgacgtccctagtccgtgcggtggaattcgacccacttcctgttctggacgtgtggagatctggcatggaggttcctgggggacagtgtgtgatgactcttgggacttggacgatgctcaggtggtgtgtcaacaacttggctgtggtccagctttgaaagcattcaaagaagcagagtttggtcaggggactggaccgatatggctcaatgaagtgaagtgcaaagggaatgagtcttccttgtgggattgtcctgccagacgctggggccatagtgagtgtgggcacaaggaagacgctgcagtgaattgcacagatatttcagtgcagaaaaccccacaaaaagccacaacaggtcgctcatcccgtcagtcatcctttattgcagtcgggatccttggggttgttctgttggccatn

SEQ ID NO: 35433 - DNA, 393 bp, Homo sapiens
  misc_feature (1)...(393): n = A,T,C or G
ctaacttctaactcttacagcctgttggcacatacacaagatccacgagaccatgctcctcagaagctacccatgtcctttctcaccatggtgtggctcttggagccctgagtatctgtgactacccactccaaaggttgactgtaagaggagagcggccttcttaattttgcatttcttaattttgtttttctccattcctgttttatgacttggccttcagatgcttcctactctggcctcctccttttttctcctaggaattgtttccaggtaacctaccatgtgcacttctcagctgctctgctcacctttgcccaccttcccgtgaccctgagagtacagatccgaataatgtggcctgtgcagagctcagagaactgtgaggactan

SEQ ID NO: 35434 - DNA, 386 bp, Homo sapiens
gttccaggagaatgcaagtcctgtcacataaaccaggtggtctaagcagaccccttctgggtctgagccacagctcactcaagctctgggttccttgggacagagttcagattagcccatggatcaggtgatgtgcaggacatgaaaaggttagatgggcgggcagcgtgacgtctcacccactgcttctgagcaggtgtccacggcccgtcctggccccagggcagtgattgactacagcaaggctgatgcctgggcagtgggagccatcgcctatgaaatcttcgggcttgtcaatcccttctacggccagggcaaggcccaccttgaaagccgcagctaccaagaggctcagctacctgcactgcccgagtcagtgcctccag

SEQ ID NO: 35435 - DNA, 505 bp, Homo sapiens
  misc_feature (1)...(505): n = A,T,C or G
tgcnnntcnnnnnnaatcgatgaacactcntcagtgtggtggaattccaaagagctcctgccctctcagccctttattcaagcctcagatttctgctcatgatctacatagatttggaaactgttttcctctgttttggtctcttgggcaacatttttggcccaagtttgggcaacatttggcccaagtttgggcattttggcagtagctgtatgggagaaaaagagtaagaggaaatattcccacagccatgaagggtgaaagggcaccttgtgcctagactagggctgcctggtcagtcccaggtgaggccaagggctttctggccatctcagggaggggccaccaggttcctcccctcaccccatattccatcaccttcctcctctgctctgggtggtaagggaagccctcctggttcccacaggctatgatgctgcatggcagaggcaggtataacacagcactacatattggaaattntttatttttctaaataccaatg

SEQ ID NO: 35436 - DNA, 440 bp, Homo sapiens
  misc_feature (1)...(440): n = A,T,C or G
gaggnnnnnnnnnnttgcctcgacgatccctagnccgtgcggtggaattccccctggacacaggagacccacagggcaggaccctaagatctggggaaaggaggtcctgagaaccttgaggtacccttagatccttttctacccactttcctatggaggattccaagtcaccacttctctcaccggcttctaccagggtccaggactaaggcgtttttctccatagcctcaacattttgggaatcttcccttaatcacccttgctcctcctgggtgcctggaagatggactggcagagacctctttgttgcgttttgtgctttgatgccaggaatgccgcctagtttatgtccccggtggggcacacagcggggggcgccaggttttccttgtcccccagctgctctgcccctttccccttcttccctgactccaggccc

SEQ ID NO: 35437 - DNA, 435 bp, Homo sapiens
  misc_feature (1)...(435): n = A,T,C or G
aggttnnnnntttgatgacactctacagtgcggtggaattcaaattttatttttaaatggttcttcaagtcagattaaagtaataatagcaaattatgtgattatccatgtcccagcctctctccaaaaaaatagtaaacaagatgtcttcttcttttcccaaagatacacatacacacatgtacaaatttttttatcagataataatagctaatatttaatgagtacttaccttagtttgtcccctttacaacagctttacatctgtgtgattgatacagttcatattcccattttataactgagaaaactggtgcacagagaggataagcaacttgccaaaggtcacacagttaataagtggaaatgctggggtatgaaccaggtagtctgcccccatagctctgccccccagagctgtactgtctcccatga

SEQ ID NO: 35438 - DNA, 437 bp, Homo sapiens
  misc_feature (1)...(437): n = A,T,C or G
agggggnnnnnatcgatcgacgtcattagtccgtgcggtggaattctccccactgtctgcgtcggccttgcttttgtggtcttcctctgtggccagagcgttttcatcaccaagcctcctgatggcagtgccttcaccgacatgttcaagatactgacgtattcctgctgttcccagaagcgaagtggagagcgccagagtaatggtgaaggcattggagtctttcagcaatcttctaaacaaagtctgtttgattcatgtaagatgtctcatggtgggccatttacagaagagaaagtggaagatgtgaaagctctggtcaagattgtccctgttttcttggctttgataccttactggacagtgtatttccaaatgcagacaacatatgttttacagagtcttcatgtgaggattccagaaatttcaaatattac

SEQ ID NO: 35439 - DNA, 505 bp, Homo sapiens
  misc_feature (1)...(505): n = A,T,C or G
cgcgnnntnnnnnnnatcgttgatcctacttagtgtggtggaattctgccccagatttcttaaagtttgatatgtatagaatataattgaaggaggtatacacatattgatgttgttttgattatctatggtattgaatcttttaaaatctggtcacaaattttgatgctgagggggattattcaagggactaggatgaactaaataagaactcagttgttctttgtcatactactattcctttcgtctcccagaatcctcagggcactgagggtaggtctgacaaataaggcctgctgtgcgaatatagcctttctgaaatgtaccaggatggtttctgcttagagacacttaggtccagcctgttcacactgcacctcangtatcaattcatctattcaacagatatttattgtgttattactatgagtcaggctctgtttattgtttcaattctttacaccaaagtatgaactggagagggtacctcagttataaggagtct

SEQ ID NO: 35440 - DNA, 456 bp, Homo sapiens
  misc_feature (1)...(456): n = A,T,C or G
aaataagacgtctataggccgngcggaggaattcccttaaaaggttttctgatgaatgtgtgaaagagttgattatttcaacagtattggttaagtcacaacgacgaagtgctgagaaggtgatgggtaccaggaagaaacaaacagaagtcttaagattagaatgagaaccaaagagaatttaaccctgccattttttttttttaaccccaaaatcctaagtaattccaaatgccttagatatcaatgaaagctacccaccattgagaggggcaaaattttttttttacaaggggagcaatcaagtaaatacctgttttctttcaatggactgttgcctattgagcattggggatgatgtgttttcaaatttccaggggaagttctgaccctacctgtttggccaaagacgtaaattgagaggaaaggccttggtcttcctgatcaaccagtatn

SEQ ID NO: 35441 - DNA, 450 bp, Homo sapiens
  misc_feature (1)...(450): n = A,T,C or G
cccatgggatgatcttatcgccttgtgtatcaaccacaagctgagagactggacgcccccccggcttcctgttacatcanaggcgctgagtgaagatggtcagatatgtgtgtatttttttaaaaaacgatttgaaaaaatatgatgttcctttgtcgtgggaacaagccaggttgcagacgcagaaggagctacagctgagagagggacgtttggcaataaagccttttcatccttctgcaaacaattttcccataccattgcttcacatgcaccgtaactggaagaggagcacagagtgtgctcaagaggggaggattcccagcacagaggatctgatgcgaggagcttctgctgaggagctcttgccgcagtggttgtcgagcagtctgctgctggagaaagaagagaacaagaggtttgaagatcagcttcagcaatgggtgtctg

SEQ ID NO: 35442 - DNA, 452 bp, Homo sapiens
gaaacctggagaacagccaacaagaggcccttgaatctctacgtggccactgaactgctgggcccgggagactggactacaacacctcacactggtcagctggtttctacttggtgtttggtttttcccagccccattttatcttcagcggagccgcggtgtttgttttgtgaaagcttctgattaatttattatattgacgataaaactcaaacctacccagccttccccccactccatggaagtccttgggatgggcgtctgctctggacaccccaaagagctcctgccctctcagccctttattcaagcctcagatttctgctcatgatctacatacatttggaaactggtttcctctgttttggtctcttgggcaacatttttggcccaagtttgggcaacatttggcccaagtttgggcattttggcagtagctgtatgggagagaa

SEQ ID NO: 35443 - DNA, 459 bp, Homo sapiens
  misc_feature (1)...(459): n = A,T,C or G
ctcgtctgtgagttacagctgcacgctctccaggaaagaaggaatttcctcttctctggaaaccccaccacacagctggtttctcattggtgctgcttgcccattccctgagctgtgactgccaaaggagtggggttggtggtgcctccagcccatcaggggcaggccctgggaccgcctgggaacaggaggactatggcacaaaccgagtgagtgatgggagcaacccgcagggctctgccacatccctgtcttccttcactgacatgaaacgcagaaaaggcagctttgccacaacacaggagcacgcaccgaatgtggccgcccagggctctgtccttgaccctgttgtccaggactgtttaccaagggctgacaggcactgagtgccccgtgcacctggccagacactgcactcatgcagcggaaaggacagtgaacgagactttgtccctggcn

SEQ ID NO: 35444 - DNA, 504 bp, Homo sapiens
  misc_feature (1)...(504): n = A,T,C or G
agcccnntnnnnnnnaattcgtttactctccttagtgtggtggaattcatcatcatcaacatcatcactatcttaagtaagtgctttgcctacatttactgatttaattctcataacaactccatgttgtaggggctgttgttatcccagttttacaagtgaggaagtggggcctcacaagattatgttttgtgcccagggtaacagtgacaagaagctaaatctgagcagtgtcctttggttggttttgtttcattgttgactaaagtccaagaccatatctgttcctgctattcataaatttcttcttttagtcagcattttacccttactttacactatcttttggattcctgggtctgtcatcccaagtgtatctgcctcctagcttcatgctggctggtatattgtgagaaaaatatgtatcttcacctagtcatacancaggtcagaggccatgtggaattccctacagattgtgctcacttgagcccttgatgtgca

SEQ ID NO: 35445 - DNA, 456 bp, Homo sapiens
  misc_feature (1)...(456): n = A,T,C or G
catcgtgactttcgtccgngcggcggaattccagaggctgagaacgttgccgtgaagaggcttaaaagcaagacccggagtggcgaccttaaagaggacggactgaagaaacgcgggaatgagctccagacgcgggagtttcctctctacaaagttacactgcagcagctgtctaccctgccccttgtcttttgagaagttcaaaccttcagaaaagttgcaagaacacgaggctaaaggcagcagttcactatactgtgggttgtctttgcgaggaagttgcattggacaaagagatgcagttcagcaaacagaccattgcggccatttcggagctgactttccgacagtgtgaaaattttgccaaagaccttgaaatgtttgcaagacatgcgaaaagaaccacaattaacactgaagatgtgaagctcttagccaggaggagtaattcactgc

SEQ ID NO: 35446 - DNA, 440 bp, Homo sapiens
  misc_feature (1)...(440): n = A,T,C or G
gggtannnnnnatcgatgaccctactcagtgtggtggaattcgttttgttttgttttgttttgttttgtttttggagatagggtctcactctgttacccatgctggagtgcagtggcacaatcttggctcagagcaacctctgcctcccaggctcaagcaatcctcccacttcagtctaagtagctgggactacaggcacgtgccaccaggcccagctaatttttgtgttttgttagagatgaggttttgccatattgcccaggctcgtcttgaacaccggggctcaaggaatctgcccatcttcgcctcccaaagttctgagatggcaggtgtgagtcatcatgcccagcctccttgaagtttactaacaattgggataactgagggaagagaagtgacaattccactcagtctattagaggtctggatataaggtagc

SEQ ID NO: 35447 - DNA, 440 bp, Homo sapiens
  misc_feature (1)...(440): n = A,T,C or G
aggttnctnnntttgattgcattcgttcgtgcggtggaattcgccatgcgcgggatataatctggtgtgccatttgcaaagaccattggaaaagcacagtattagggtgggagtgtcctgattttccagggacagtctgtcacagcttcccttggctaggaaagggaattacccaaccccttgtgcttcctgagtgaggtgattccctgccctgcttcggatcacactctgtggtctgcacacactgtccgacaagccccagtgagatgaaccgagtacctcagttggaaatgcagaaataaccagccttctgcatcactcatgctgcgagctgtagactggatctgttcctattcggccaccttggaacctatcactacacactgtgcagacaccagatcttgagaggactcattatcaccagaacagcgagggggatn

SEQ ID NO: 35448 - DNA, 436 bp, Homo sapiens
  misc_feature (1)...(436): n = A,T,C or G
gttacagccagcaaggtgcccccatcttagagtgtggtgtccaaacgtgaggtggcttcctagttacatgaggatgtgatccaggaaatccagtttggaggcttgatgtgggttttgacctggcctcagccttggggctgtttttccttgttgccccgctctagacttttagcagatctgcagcccacaggcttttttggaaggagtggcttcctgcaggtgttccacctgccttcggagcctgccacccaggccctcagaactgagccacaggctgctctggccaggagagaaacagctctgttgttctgcattgggggaggtacattcctgcatcttctcaccccctcaaccangaactggggatttgggatgagatatggtcagacttgtagataaccccaaagatgtgaagatcgcttgtgaaaccattttg

SEQ ID NO: 35449 - DNA, 487 bp, Homo sapiens
  misc_feature (1)...(487): n = A,T,C or G
agcgaccnnnnacgatgtgcatacgtagtgncgngcaattctaaaacttgagcgagaacgcttgcaactggaaaaggataggctgcagttcttgaagtttgaatctgagaagctgcagattgaaaaggaacgcttacaggtagagaaagacagacttcgaattcagaaagaaggacacttgcagtgatttttccaggcttccatttagcaaatgtttgaaaactctagatttttctcatatcaggtgatataatgatggttgctggattagctgtggtttcttgtctaatgtcagtgttcagtaggaaaaagttatatgtggataactgtatgcctaagtagtatataaaagctgtgccctagcgtaaacagtatagcagaaacttactgtgctggactctttaccttataatattacatagagtcttgtattgtctgtgtacccagagtttacaattatgtccatataaaattctagcccagaagn

SEQ ID NO: 35450 - DNA, 489 bp, Homo sapiens
  misc_feature (1)...(489): n = A,T,C or G
aggcgnncnnnntttgtctagatcactagtccgtgtggtggaattccactgctttaactttctccaaatcctaattacttctagtgtggcctgaggactgcactttgaatggcatgggccaaataaccatgtttttgttttttttcacgaagtggagaataatttggggttgggactacactgggggtgagctggtgagatggaaaatggaagtggtgtcagtgggaggcaatgatggtatgtatcttggaagaaggatgcttaattttaacacggaaagactggaagaagggaagatacaaagaggtggtctccagaagacagtcagacaaataacagagccttagaaataaaaccttttgggctgggtggcccaggttctcaattgctgcctctacaggaaagtctttgggttcggaggattcccaaaacatgaaggagaagttggaggacatggagagtgtcctcaaggacctgacagaggagaag

SEQ ID NO: 35451 - DNA, 490 bp, Homo sapiens
  misc_feature (1)...(490): n = A,T,C or G
agagtnctnnnccggatgatcctactccagtgtggtggaattcctgccccagcccagccccagcctctgctcttttgagcagccctcgctggaacatgtcctgccaccaagtgccagctccctctctgtctgcaccagggagtagtacccccagctctgagaaagaggcggcatcccctaggccaagtggaaagaggctggggttcccatttgactccagtcccaggcagccatggggatctcgggtcagttccagccttcctctccaactcttcagccctgtgttctgctggggccatgaaggcagaaggtttagcctctgagaagccctcttcttcccccacccctttccaggagaaggggctgcccctccaagccctacttgtatgtgcggagtcacactgcagtgccgaacagtattagctcccgttcccaagtgtggactccagaggggctggaggcaagctatgaacttgctcgctggcccacc

SEQ ID NO: 35452 - DNA, 440 bp, Homo sapiens
  misc_feature (1)...(440): n = A,T,C or G
gcggggnnnntttgctcgacgtcattagnccgtgcggtggaattcggcggcggtcgtgcggacgcaaacatgcagatctttgtgaagaccctcactggcaaaaccatcacccttgaggtcgagcccagtgacaccattgagaatgtcaaagccaaaattcaagacaaggagggtatcccacctgaccagcagcgtctgatatttgccggcaaacagctggaggatggccgcactctctcagactacaacatccagaaagagtccaccctgcacctggtgttgcgcctgcgaggtggcattattgagccttctctccgccagcttgcccagaaatacaactgcgacaagatgatctgccgcaagtgctatgctcgccttcaccctcgtgctgtcaactgccgcaagaagaagtgtggtcacaccaacaacctgcgtnccaa

SEQ ID NO: 35453 - DNA, 494 bp, Homo sapiens
  misc_feature (1)...(494): n = A,T,C or G
attcgatgaacactcgtccagngtggnggaattccagaaatacaaaaaattagctgggcgtggtggtgggcgcctgtaatcccagttactcgggaggctgaggcaggagaatcacttgaacccgggaggcagaggttgcggtgagccaagagcgcaccattgcactccagcctgggcgacaaaaacgaaactccatctcaaaacaaaacaaaacaaaacaaacaaacaaacaaaacttgcatctaaccaaaaagtcttggttttatcttaatccattaaaaagttgttctttgtttccagcttgcattgattgctacaacatcactaatttggctttcacatttaaatggttctgtgctaatcaaaactttcgttgttattattcgttatggtagaatcatttttaattcacgtgctttgtggtcagttttgtggtctgagagatgtaccaattgtcaaattaccgtgtaccacctaatgtttataggagaaan

SEQ ID NO: 35454 - DNA, 436 bp, Homo sapiens
caagactggagacaaagtgggagccagcgaagccacgctgctgaacatgctcaacatctcccccttctcctttgggctggtcatccagcatgtgttcgacaatggcagcatctacaaccctgaagtgcttgatatcacagaggaaactctgcattctcgcttcctggagggtgtccgcaatgttgccagtgtctgtctgcagattggctacccaactgttgcatcagtaccccattctatcatcaacgggtacaaacgagtcctggccttgtctgtggagacggattacaccttcccacttgctgaaaaggtcaaggccttcttggctgatccatctgcctttgtggctgctgcccctgtggctgctgccaccacagctgctcctgctgctgctgcagccccagctaaggttgaagccaaggaagagtcggaggag

SEQ ID NO: 35455 - DNA, 492 bp, Homo sapiens
  misc_feature (1)...(492): n = A,T,C or G
ntttgtcgacatctctaggccacgccgnggaattccagaggcgcagctctggatctaccctgtgaaatcctgcaagggggtgccggtgagtgaggcggagtgcacggccatggggctgcgcagcggcaacctgcgggacaggttttggcttgtgatcaaccaggagggaaacatggttactgctcgccaggaacctcgcctggtcctgatttccctgacctgcgatggtgacaccctgactctcagtgcagcctacacaaaggacctactactgcctatcaaaacgcccaccacaaatgcagtgcacaagtgcagagtgcacggcctggagatagagggcagggactgtggcgaggccaccgcccagtggataaccagcttcctgaagtcacagccctaccgcctggtgcacttcgagcctcacatgcgaccgagacgtcctcatcaaatagcagacttgttccgaccccaagaccagattgcttactcaan

SEQ ID NO: 35456 - DNA, 484 bp, Homo sapiens
  misc_feature (1)...(484): n = A,T,C or G
gaggcccnagccccccaactgaaaccttagctgtgacgcccttgcgcaagcacttccttctacctaaactttcgaactttttttagacacaggaagtagcaagaagggagatgccatgtgacaatcaccaggaagatgatctgtatgccacaacccatttcaacagtgaccctgctgtacttgtcaatgtagagcaacaattatctaccagcctggatgatttaacaccagcacatggttctgtcccaaacaacgctgtcctgggaaacaggacaactcctctgcggacactgctgttgtctcctgggacttcagaacacagaaagatttttaccaagaggtcactaagcccatcgaagagaggattcaaatggaaggacaatatccttgccaacctgaatctaaagcatggtttccaagatgctacaggcagcgagcctctctctagtgacctgggtagtttgcacggtttggctggaaaccc

SEQ ID NO: 35457 - DNA, 491 bp, Homo sapiens
  misc_feature (1)...(491): n = A,T,C or G
nttgtcgacgaccctagtccagngcggnggaattctcatgccagtgtgcccacctgcctggtctacatcctaaagagatgtaccgtcccccctccatgcgggcaccaccactcccaggagccaagctggaggaccgcgacctgggctgggagcagagctgactgacacgggtggaggtgaccctgagccaagttctctggcacttgctggacatgtcccctaccctcttcccaagaggagccatcccacatttgggtagttagtacccaggactggttggactgatcgggttagggaccctagagggttaagggaacaacagagatggggctgcaatgccctgtctggaactccgctctcccgctggggtggttctgattgtggctcatgcctggttgcaaattggtttttaacccacaaattgtgattattttttaaaaagccaaacagattttggcaggagttagaataaatcccggggcctgggcttc

SEQ ID NO: 35458 - DNA, 492 bp, Homo sapiens
  misc_feature (1)...(492): n = A,T,C or G
cccccccccccnaggnnagggttagannccctnnnaactgatgacactaggacagagcggaggaattctttttgagaccagttaactttaattttcaaaataaatctgcagtattttgcatgttagtaatacagtgctggtattgacaggtaaaatcatcatctgcttacatagaaaccttcattcaggagcacaccgtaggaggggaacggatacacaataaaaagcaaacgcaggccaagcagcgagccctagagcgtaacaggctggatgtcagatttaaggattatctaatacaactgtttagctgccaatctgataaaggggaagctctcaaccaggttacaaccagaagggaaaaacgtactctgccttttcgtagagcagtggctgtcgtgccttcaacacctggttgaatcagttcatcaacatcgaaactcaattccagttccaagacacagaatttcatcacacaacctattcggtacccct

SEQ ID NO: 35459 - DNA, 456 bp, Homo sapiens
cccatatttgctgaactagcaactaagaaaccacttttccatggggattcagaaattgatcaactcttcaggattttcagagctttgggcactcccaataatgaagtgtggccagaagtggaatctttacaggactataagaatacatttcccaaatggaaaccaggaagcctagcatcccatgtcaaaaacttggatgaaaatggcttggatttgctctcgaaaatgttaatctatgatccagccaaacgaatttctggcaaaatggcactgaatcatccatattttaatgatttggacaatcagattaagaagatgtagctttctgacaaaaagtttccatatgttatgtcaacagatagttgtgtttttattgctaactcttgtctatttttgtcttatatatatttctttgttatcaaacttcagctgtacttcgtcttctaatttcaaaaa

SEQ ID NO: 35460 - DNA, 464 bp, Homo sapiens
  misc_feature (1)...(464): n = A,T,C or G
ctcgtggtcgtcactagtgcagtgcggaggaattcttcttttaattttgtcaaatggagacaaatcgttgaatataaagatacctaatgttcgtgagtttatgtgaaaaattgggagaagaaatcagcattttaataaaacaaaattgttttctaaagttagtacttccacagtaccacacacacacgcagattgagaataaacattttcacagaatatgggggaaaaggaggaaaataatccccagccttaggaatccagtttttgttgcatagaactctgacctgattaaggtcagtcattttttttgttgctggtgttggtagctgatcctgcttcagatgatccatctattatttcccctttccgcctttttaaaccatcaccactgacttttagaagccagagtttatatcgtttgtgataagcttcttggtgttatcacaataaatcgtanagctttn

SEQ ID NO: 35461 - DNA, 463 bp, Homo sapiens
  misc_feature (1)...(463): n = A,T,C or G
cttcgtgctcgatcgttagagcggnggaattccccggctcgagcggccgctggtagtgtccagaagaatggacacctgctccagatttagatgcccatctgggcttttgtttgatttgcggcgttcctgtcttctgtaaagctagtgagttgtcccaagagactgatgccacagcttgttcgcagtttacacaaactcagctttaaaattccaaatagaatctgacttgcaaactctagctgcagcatgtggagcttctagatgtttactaccttgaatggttgtcagtgtcactgaaccacaggggagaggagtatggggtagagcaatggtctgggccaaggaatggtgagcttagggtcttcctctgactccttactcctcaaggaggcagttagggtccctcttaagcaggcttctatttcttaccactaaattggtttcctttttcatccagaagtta

SEQ ID NO: 35462 - DNA, 390 bp, Homo sapiens
gcgcggagctgtctagtgagggcatccgggatgaccgcaatgaggagaagcgcatcactgaggcagagaagaacgagcgtgtgcagcgggagctgctgacgctgagcagcgagctgtcccaggcccgagatgagaataagaggacccacaatgacatcatccacaacgagaacatgaggcaaggccgggacaagtacaagacgctgcggcagatccggcagggcaacaccaagcagcgcatcgacgagttcgaggccctgtaacagccaggccaggaccaaaggcagaggggtgctcatagagggcgctgccacccccgccacgcttgtgtctttagtgctccaagtctaggaactccctcagatcccagttcctttagaaagcagttac

SEQ ID NO: 35463 - DNA, 437 bp, Homo sapiens
  misc_feature (1)...(437): n = A,T,C or G
aggggntncnnnnaatcgatatccctcgctcgtgcggtggaattcggaggatgcaagtcctgacagattcagcaacactgactatgctgtggggtacatgttgaggctgggggctcctgccagtaagctggtgatgggcatccccaccttcgggaggagcttcactctggcttcttctgagactggtgttggagccccaatctcaggaccgggaattccaggccggttcaccaaggaggcagggacccttgcctactatgagatctgtgacttcctccgcggagccacagtccatagaatcctcggccagcaggtcccctatgccaccaagggcaaccagtgggtaggatacgacgaccaggaaagcgtcaaaagctaggtgcagtacctgaaggacaggcagctggcgggcgccatggtatgggccctggacctgg

SEQ ID NO: 35464 - DNA, 444 bp, Homo sapiens
gcctggtccagcatcgtctaccagctgattcccaacgttcagcagctggagatgaacctcaggaattttgcccaaatcattgaggccgatgaagttctgctgttcgaaagagctacattcttggttatttcccactaccagtgcaaagagcagcgcgacgtccaccggtttgagaagatcagcaacatcatcaaacagttcaagctgagctgcagtaaattggccgcttccttccagagcatggaagttaggaattccaacttcgctgctttcatcgacatcttcacctcaaatacgtacgtgatggtggtcatgtcagatccgtcgatcccttctgcggccactctgatcaacattcgcaatgcccggaaacactttgagaagctggagagagtggatggccccaagcacagtctccttatgcgttgaatattgccaaatgct

SEQ ID NO: 35465 - DNA, 490 bp, Homo sapiens
  misc_feature (1)...(490): n = A,T,C or G
tttatcgagatcactaggccangngnggaattcgtccttttccggcgggacggtgctgtcccggcctctctactacaccgcgcccttctatcccggctacacgaactatggctccttcggacaccttcatggccacccggggcccgggccaggccccacaaccggtccggggtctcatttcaatggattaaaccagaccgtgttgaaccgagcggacgctttggctaaagacccgaaaatgttgcggagccagtctcagctagacctgtgcaaagactctccctatgaattgaagaaaggtatgtccgacatttaacgcgggctgcgtcggtcccggacttttctaatttattaaaaacatggccttggcagttatttttccatcaccgagagagagagacagagagagaaaataaactacccctcctattcagaagtttatagtttatggagatggatgacatanaaatgtaaacatctccacacacan

SEQ ID NO: 35466 - DNA, 454 bp, Homo sapiens
  misc_feature (1)...(454): n = A,T,C or G
attgaaaatcgatgaccactagncagtgcggtggaattcgaagaaggtttttgctataaatttcatttaatgccattaaggccaagaaggtggcattaaatgaaatttataggaagaaggtttttgctcagtacctggcatgcaacagacattggataaatgttagttggatccagatatacacagaaagatatctgcttcctgccaggctggataactgttgaatggacacttgtccatagtctagaaagccagtgcttctaatccttaagccagatctttgactaccttttcagttgcttctttaacactctttgttgcttctctgtgtgtcctagtttaaattcatttcctctccagcaaaagtgagcttaaataatttctccaaactaaagctctcatgtttttggaagggctgcctttgcaagtgaggtttctgagaaatgactgttgt

SEQ ID NO: 35467 - DNA, 481 bp, Homo sapiens
  misc_feature (1)...(481): n = A,T,C or G
cccccgcccgcnncngnnttagannccatcgagnacactagtcagtgcggtggaattcccgacgctgtggttgctgtaaggggtcctccctgcgccacacggccgtcgccatggtgaagctgagcaaagaggccaagcagagactacagcagctcttcaaggggagccagtttgccattcgctggggctttatccctcttgtgatttacctgggatttaagaggggtgcagatcccggaatgcctgaaccaactgttttgagcctactttggggataaaggattatttggtcttctggatttggaggcaatcagcggacagcatggaagatgtgtgctctggctcggataagagatgggacatcattcagtcactagttggatggcacaaggctcttcacagacgcatctgtagcagagtggaacttgtactaacttatgatagaatgtatcagaataaatgtttttaacagtgttaaaaa

SEQ ID NO: 35468 - DNA, 454 bp, Homo sapiens
  misc_feature (1)...(454): n = A,T,C or G
natcgagattcgtaggccatgcggnggaattccaaagtcaacatccctgggttcatccacacctgtgttttctatgagttctccaatatcaaggagatttaacaatttgtttggtaaaacaggaacgtataatgtttccaccccagaagcaaccagctcatccctggaaaactcatccagtgcttcttcgttgctcaactaagaacaggataatccaacctacgtgacctcccggggacagtggctgtgcttttaaaaagagatgcttgcaaagcaatggggaacgtgttctcggggcaggtttccgggagcagatgccaaaaagactttttcatagagaagaggctttcttttgtaaagacagaataaaaataattgttatgtttctgtttgttccctccccctcccccttgtgtgataccacatgtgtatagtatttaagtgaaactcaagc

SEQ ID NO: 35469 - DNA, 465 bp, Homo sapiens
  misc_feature (1)...(465): n = A,T,C or G
attgaggccctgntanntttgtagactatagtccatgcggtggaattcaagggagacttttctctgaataacattttgtatcttttgaattttgaatcatgtgaatgtatcaaaaaataagtgtaagtaaaaatatttttacaactttaaaaataggttttactggactggagcactcagaggacaacagagcggaagtggaaagcaaactaaccttttattgagcatttactgtgagctagaccttcagccaggtgctttatgtacatgatatcttttaatccacacaaccctggacaaaggcagtatcatcctcatttttatccattttaaatggaagcttgccaggtatggtggctcacacctgtagtcccagcactttgggaggccaaggcaggaagatcacttgagcccaggagtttgaaaccagcccaggcaacatagtgagaccttatctctacaaan

SEQ ID NO: 35470 - DNA, 453 bp, Homo sapiens
  misc_feature (1)...(453): n = A,T,C or G
aaccgagaatcgtaggcagngcggnggaattctgacagcacccccgcccccaccaccccccgtgtacgagccggtgagctaccatgtccaggagagcttgcaggatgagggcgcagagcccacgggctacagcgcggagctgtctagtgagggcatccgggatgaccgcaatgaggagaagcgcatcactgaggcagagaagaacgagcgtgtgcagcggcagctgctgacgctgagcagcgagctgtcccaggcccgagatgagaataagaggacccacaatgacatcatccacaacgagaacatgaggcaaggccgggacaagtacaagacgctgcggcagatccggcagggcaacaccaagcagcgcatcgacgagttcgaggccctgtaacagccaggccaggaccaagggcagaggggtgctcatagcgggcgctgccagccccgccc

SEQ ID NO: 35471 - DNA, 457 bp, Homo sapiens
attgttgacgtccctagtccgtgcggtggaattccgggagcaagtctaagggattttaagggattttaaatcttcctgggccagggctagggagctctagtgacagtgtcttggtctggaatccaactctccaattttgaggccgcagggaggaattctgagactttagaggccgcacagccttcagcgcgctcaccgcgtccaggcgtcagtgaggggctatctcgaggcgcgagtgcacaaaaggtagcgcgagtctcttctcaggcgatccagataagaggaaatgagagccgggttttctgacttccaactcattaaggaccaggttctttttcttcaggatcaggcacagagactgactgaatggctccaattatcaggatttgaaaacccagtatcagaatctaccactttgtgcctgagggagagggaaaagcggatacccacctgtgtc

SEQ ID NO: 35472 - DNA, 395 bp, Homo sapiens
  misc_feature (1)...(395): n = A,T,C or G
caaccatgagataatacaagccagggagaggcttgtattacatgacaggtgtaattagtctgctgagccagctttacccaatgaagggcatatgtgttagagagattagctaagagtagaaattcgagcatagaggccaggtgcggtggctcacgcctgtaatcccagcactttgggaggttgaggcaggcgtgtcacttgaggccaggagttcgagaccagcctggccaacatgatgaaaccccgtctctactacaaatacaaaaattagccgggtgtggtggcacacgcctgtagtcccagctactggggaggctgaggcagcattgcttgaacccangaggtggaggttgcagtgagccaagatcacaccactgcactccagcctgggcgan

SEQ ID NO: 35473 - DNA, 387 bp, Homo sapiens
  misc_feature (1)...(387): n = A,T,C or G
atttcttgaaggtgtagaaactgagataaatcatcactactattgctgagaacatttattcaggtgaaaaacaaaggcaacaatgcaaaagaattgggctaaggccaggcaaggtggctaacacctgtaatcccaacactttgagaggccaaggcgggaggatcactttcaagaccagcctgggcaacctattgagaccccatctctatgaaaaatagacaaaactagctgggcgtggtggtgcacccctatagtcctagctactcgggaggctgagataggaggattgcttgagcccaggaggcaaaggctgcagggattcaggatcatgccactgcactccagcttgagccacaaagtgagactctgtctctaaaagaacaacan

SEQ ID NO: 35474 - DNA, 395 bp, Homo sapiens
  misc_feature (1)...(395): n = A,T,C or G
cagatggggtgtgcctcagtggggatagaggcccacagggtgacaaggccatcagggagcaaggccccagggagcaggagccagaactcagcttcctgaagcagaaggaacagctggaggctgaggcacaggcattaaggcaagagttagagaggcagcgacggctgctggggtctgtacagcaggatctggagaggagcttgcaggatgccagccgcggggacccagctcatgctggcttggctgagctgggccacagattggcccagaaactgcagggcctggagaactggggccaggaccctggggtctctgccaatgcctcanaggcctggcaccagaagtcccacttccagaattctagggagtggagtggaaaggaaaagtggtgggan

SEQ ID NO: 35475 - DNA, 460 bp, Homo sapiens
cttcgatgatcaccagtccagagcggtggaattccaggaaaactgaaggatatggggaatcattggttatcttccattgtgtttttctttatggacaggagctaatggaagtgacagtcatgttcaaaggaagcatttctagaaaaaaggagataatgtttttaaatttcattatcaaacttgggcaattctgtttgtgtaactccccgactagtggatgggagagtcccattgctaaaattcagctactcagataaattcagaatgggtcaaggcacctgcctgtttttgttggtgcacagagattgacttgattcagagagacaattcactccatccctatggcagaggaatgggttagccctaatgtagaatgtcattgtttttaaaactgttttatatcttaagagtgccttattaaagtatagatgtatgtcttaaaatgtgggtgataggaatt

SEQ ID NO: 35476 - DNA, 489 bp, Homo sapiens
  misc_feature (1)...(489): n = A,T,C or G
agcgnnctnnncctcgtgaccctactcagtgtggtggaattcgcgcggcgacagctagggttcacggccactggggcagaggagccgcgagaagatgtgggtttttggttacgggtccctgatctggaaggtggatttcccctatcaggacaagctggtcggatacatcaccaactacagcaggcgcttctggcagggcagcacggaccaccgcggggtccccggcaagcctggaagagttgtgactcttgttgaagatcctgcgggatgtgtatggggtgttgcttacagattgccagtaggaaaggaagaagaagtaaaagcataccttgacttcagagaaaaaggaggctacagaaccacaacagtcattttttatccaaaagatcccacaacaaaaccattcagtgtattgctatatattggaacatgtgataatcctgattaatttggtcctgcacctctggaagacattgctgaacaaatttt

SEQ ID NO: 35477 - DNA, 466 bp, Homo sapiens
  misc_feature (1)...(466): n = A,T,C or G
cttcgatcagccctcgtccagcgcaggggaagtcgtgtttttgacttaacaggccccgttgactggaggatggccatttgacaacacattatttcctgaggaaacttttgacttctggtgacttgggccccaggctggctgaatttgccaagacccggctttgcccttgcatgtgtgaaaaatggcctcaagtatgaccccatggcaagatggaaagaaactgtgctcttgaatagcttagagattcagagccccccaaccagcttgaaacgcccacctcaaaacaatgacatgagaagaaacaaacctctaatttaagccactgtctttttaagagcattgtagtttgagatctctttctttcagctgtttagtccccagctaaacacttactgaccttatcttacaggtcaagaaaaatgaagttctggggtacaagtcactaatgtattagaaattntccagn

SEQ ID NO: 35478 - DNA, 442 bp, Homo sapiens
  misc_feature (1)...(442): n = A,T,C or G
cgggcnnnnnnnnnatcgatcgacgtccctagtccgtgcggtggaattcggtcgtggagactcttcacaggctgctgtgtgaatcccaggaaaatctttcccagaggccacagctgccgtttcttctacgtcctcggccagatcactctgagctcattggtggctccagtgatgtggctttctgtggctctgctcaatggaactttctatgaatgtgccatgagcgggacgagaagttcaggactcctggaactgatttgcaagggtaagcccaaagagtgctgggaagaacttcacaaagtatcttgtggcaaaactagcatgctacctaccgtcaatgaagaactgaaactctcccttcaggcccagtctcagattctaggatggtgcctgatttgttcagcgtctttcttctctctgctcaccacatgttatgctcgcn

SEQ ID NO: 35479 - DNA, 421 bp, Homo sapiens
  misc_feature (1)...(421): n = A,T,C or G
gctcaggtgggtgggacacatgccttcctccccctattccacccccaagttgatctgagtatcgtcaggggcccaaagtacagaattgttctttgctttttattgaatgctccaaaggccaaacttctggggctgggggttggtcttggaaacaggggtcctctgacttcctcatgggggcttgctcataccgcccctcctggtggatgtgtgtgtttattatgtggagtccctgccacttactgccttatgacctangactgatgctgtggggtgctggtggagcagctgatgtcgtgtttacagagcaaggcttccctgtctcccacggggaggggctcgggcctctagtcagacattcctgcagagggtcggtggaggggtcattcacctgcccctgcagcaagcaaaagttgtctgg

SEQ ID NO: 35480 - DNA, 424 bp, Homo sapiens
tcacagtgttcatgattgcagtgtctggaatttgcatcctgctgaatgtcactgaattgtgttatttgctaattagatattgttctgggaagtcaaaaaagccagtttaacgcattgcccagttgttagattaagaaatagacagcatgagagggatgaggcaacccgtgctcagctgtcaaggctcagtcgccagcatttcccaacacaaagattctgaccttaaatgcaaccatttgaaacccctgtaggcctcaggtgaaactccagatgccacaatggagctctgctcccctaaagcctcaaaacaaaggcctaattctatgcctgtcttaattttctttcacttaagttagttccactgagaccccaggctgttaggggttattggtgtaaggtactttcatattttaaacagaggata

SEQ ID NO: 35481 - DNA, 472 bp, Homo sapiens
  misc_feature (1)...(472): n = A,T,C or G
nattgacgaccattagtccaatggagngccatttcgaaagncgcctttgctgcaaccgacttactttccttctgtcttcacccattctggcacaatctggcgccatcgtccttcttgtgaggccaagcctgaaaaggcgaagtatagaggcaggaccaaaattgaggcgaatccaggaacctgccaatgggtctccgggtgcggtctctgaaactggaggatatcgggaggaaaggctctccgatgcggagataatggggaagctcttggcatggttggctgtaggtacgtgataccggaggagcaggagtcaaataggatacgccgacttttaattcaaggaacccttttctgaaacactttgccacaatgaaggaaataaggaattgtactctcagagatgttgagaaaagatacatgcgtcttggaagataattactcaaaatatgcagggaaggaataacactgaagg

SEQ ID NO: 35482 - DNA, 453 bp, Homo sapiens
  misc_feature (1)...(453): n = A,T,C or G
nattgagattgagaaccatagccaagngcggtggaattcggattacaggcttgagccactgcacccagcccccttttgctacattctttgtagcgtttgataaggagaatttgaatcgtagcgggagagccagaggaagagatggcatcttaataatcacagaaaaagaggaaagcaatgaaaaacattaggatcaagtagacagacattcgatcatgcttttctgccaggagtgaatttccatgatcccactgatgacttagactgttctcccttgattcaggctctagagaagcattcaaacgttgggactatatttctgacatcgttattaagtgattttactacagatgagaaggcttggagggcttcccctatctcagcattgtctgttctaaagcctaatgcagctttgtctgtatttgctgaccaggagcatggggaagtgattgg

SEQ ID NO: 35483 - DNA, 393 bp, Homo sapiens
gaaactggtccttctggtcctgttggtcctgctggtgctgttggcccaagaggtcctagaggcccacaaggcattcgtggcgataagggagagcccggtgaaaaggggcccacaggtcttcctggcttatagggacacaatggattgcaaggtctgcctggtatcgctggtcaccatggtgatcaaggtgctcctggctccgtgggtcctgctggtcctaggggccctgctggtccttctggccctgctggaaaagatggtcgcactggacatcctggtacagttggacctgctggcattcgaggccctcagggtcaccaaggccctgctggccaccctggtccccctggccctcctggacctccaggtgttagcggtggtggttatgacttt

SEQ ID NO: 35484 - DNA, 423 bp, Homo sapiens
ggctcacagccctttgggaaagcaacacattattgagactcactgtgattcccccgggagtcagactggctttgtcctcttcctctctggagggccatgggccatcagcaggagctccacatcgagccccaggccagaaccccctccctttcacagagagggaactttattgcacaattgggtgccttttagcttttgtgtgttgaaatgggcgtcttggaagcaagggtcaggggacagcttctaaaggtgtgagtctctgacctgagcatctgggcctcgcctgggcccttcttcctccccaggggtggaaacgtggaggggccagcagcaccccggggtctgcccaggggagtcaaggccccgaggtgggggggcctattccaggaggagtgggatctcggccctgtccagagcgagtta

SEQ ID NO: 35485 - DNA, 457 bp, Homo sapiens
atcgtgaccatcgtccatgcggtggaattcttaagcttgggccctgactcttctttgtgagaaggtacagagatggaaaccttacaatccgagactaaaacgagggtccttccctcatggctgacagcccaggtggctacaaagaatgtggcaccaatgaaggcccccaagaggatgagaatggcagcagtgccagtggcagcagcaaggtgcgacagctctggtcagaagactcctgcgaatctgactccctgcgacaaggactgtgtactgcatgaatgaggctgagatagttgatgttgctctgggaatcctgattgagagccgcaaacaggaaaaggcctgcgagcagccggccctggcgggggctgataacccagagcactcccctccctgctccgtgtcgcctcacacaagttctgggagcagcagtgaggaagaggacagtgggaaacag

SEQ ID NO: 35486 - DNA, 454 bp, Homo sapiens
  misc_feature (1)...(454): n = A,T,C or G
nttgagtcctagaccactagcaagngcggnggaattcgccagaaagtccttagtggaatatcctttgaagtccctgcaggaaagaatgtggccattgtaggaggtagtgggtcagggaaaagcacaatagtgaggctattatttcgcttctatgagcctcaaaagggtagcatttatcttgctggtcaaaatatacaagatgtgagcctggaaagccttcggagggcagtgggagtggtacctcaggatgctgtcctcttccataatactatttattacaacctcttatatggaaacatcagtgcttcacctgaggaagtgtatgcagtggcaaaattagctggacttcatgatgcaattcttcgaatgccacatggatatgacacccaagtaggggaacgaggactcaagctttcaggaggagaaaagcaaagagtagcaattgcaagagccn

SEQ ID NO: 35487 - DNA, 455 bp, Homo sapiens
ccaggggccatcagcctcgctatcacctccacccccaagtgcttggctccccaagggacagctctaaaatccccagaatctcaggctggtgggtccagctgagcatcctagttttcactttctcctcccaaaaaggaaagaaccttggtcactaaattctacgccttctggaaatcactctgctaatgacttcctgaatgatcgactgagaccaacagctggcccagccctgcatggaggagtaagaaaccctcatctgtcagagttaaggggcctgaatgggtacaggtcacattcttggagctcaaggtgacaggccagagcccaggtccccaggacagtgcagcaccttgtccaggcgggcctcccgtttctggctccgggctgagcttcctggagaagaggaaggtaagatacatggaagggaatggaggtgtgtacaccatacctgcctg

SEQ ID NO: 35488 - DNA, 444 bp, Homo sapiens
  misc_feature (1)...(444): n = A,T,C or G
agggggnnnnnntttgctcgacgatccctagtccgtgcggtggaattcctggaaacagtggattctgtgaagttggcagacaaagtgaacagttcctggcagagaaaaggttctcctgaaaggttaaaggttatggtccagattaacaccagcggagaagagagtaaacatggccttccaccttcagagaccatagccatcgtggagcacataaacgccaagtgtcctaacctggagtttgtggggctgatgaccataggaagctttgggcatgatcttagtcaaggaccaaatccagacttccagctgttattgtccctccgggaggagctgtgtaaaaagctgaacatccctgctgaccaggttgagctgagcatgggcatgtccgcggatttccagcatgcggttgaagtaggatctacaaatgtccgaataggaagcacg

SEQ ID NO: 35489 - DNA, 440 bp, Homo sapiens
  misc_feature (1)...(440): n = A,T,C or G
tgggtnctnnntttgatcgcactcgtccgtgtggtggaattcgtctaatatttatttttaaaatgtgattagcaattatctggactaatttttaaatatatgcttatattaataaagctcataagaagtattttttaagactaatatgcttatatattcattgctttttttttttttttctgaaaaggggtctggctctgtggcccgggtgggagcccgggggcttgatctgggcccactgggggcccccccgctggcgttaaaaagatccggtcttttgaccccccggagaaccggggactacgggggcgggcccccctgccgggccatttttttagttttggaaaagagggggacctccctatgttttccgggcgggtctcaaactccgggactcaggggatactccggcttcaccctcccaaagggctgaaattatg

SEQ ID NO: 35490 - DNA, 494 bp, Homo sapiens
  misc_feature (1)...(494): n = A,T,C or G
tggtncccccgncnccccccctgaaatatcgtcgcatagancancactagnccanngcggnggaattcgacgtggggcgggagcggcggcggcgagtgctgcagacgctggtttggttcctgctcaccctgctgctggcgctcttcgggcctgacatcggcaaggtgagggcagtcattggaggcctggccgcctgcttcatcttcgtcttcccagggctgtgcctcattcaagccaaactctctgagatggaagaggtcaaaccacccagctggagggagctggtcagctacggagtcctcttggtcaccctgggagccttcatcttcggccagaccacagccaacgccatctttgtggatctcttggcataaccactgcctcccagggaacacaaggcctttgccattggtcgcaggaacccatctcttagagctatggggccattcttagtccacgatcattccaactggtgggatgacatccggacatcc

SEQ ID NO: 35491 - DNA, 487 bp, Homo sapiens
  misc_feature (1)...(487): n = A,T,C or G
gcgtnctnnntttcgatgtcctacttcgtgtcgtggaattcccgggagctggtgctggtggtccaggtgcataaccggcccgaatacctcagactgctgctggactcacttcgaaaagcccagggaattgacaacgtgctcgtcatctttagccatgacttctggtcgaccgagatcaatcagctgatcgccggggtgaatttctgtccggttctgcaggtgttctttcctttcagcattcagttgtaccctaacgagtttccaggtagtgaccctagagattgtcccagagacctgccgaagaatgccgctttgaaattggggtgcatcaatgctgagtatcccgactccttcggccattatagagaggccaaattctcccagaccaaacatcactggtggtggaagctgcattttgtgtgggaaagagtgaaaattcttcgagattatgctggccttatactgttcctagaagaggatcactact

SEQ ID NO: 35492 - DNA, 466 bp, Homo sapiens
  misc_feature (1)...(466): n = A,T,C or G
cttgagaccatgatcagcgtcgcggaannccgncggagctgnggcacggacgggtccgggcttgaatgcaccaaggaaaggccatttgtggggacatagcaagaaggcagctgtctgcaagccaggaggagaaccctcaccagaaacctcacagaaatcggccaacaccctcatctcgggcttccagcttcagaacaacgagaaaacaaatttctgttgtgtcctggttcccatttgtaattggcaccctaatgaaaccgttttctgtagccctggaaatggctgaaaatgaggggagggaaataaagtgctataattcagagcatggagcacaccttcctggttcacctgagctggattcggagaggtaaaatggccattacctcgtctaagctgccacttacagacacagtacaggatgaggcccagacccacagagacaacgatgatggccacagctaagatg

SEQ ID NO: 35493 - DNA, 492 bp, Homo sapiens
  misc_feature (1)...(492): n = A,T,C or G
ggnnaagccagcccgcccccccnatagagancctagatnaccgtcgcgaagngccgcggaattcggaggcgaaaggcaaaactcacacttactatcacgtgctgattgatgcttgtgactgtccacatatatctcagagatctcagacagaagctgtgaccttcttggctaaccatgatgacagtcgggccctctatgccatcccaggcttggactatgtcagccatgaagacatcctcccctacacctccactgatcaggttcccatccaacatgaactctttgaaagatttcttctgtatgaccagacaaaagcacctccttttgtggctcgggagacgctaagggcctggcaagagaagaatcacccctggctggagctctccgatgttcatcgggaaacaactgagaacatacgtgtcactgtcatccccttctacatgggcatgagggaagcccagaattcccacgtgtactggtggcgctactgta

SEQ ID NO: 35494 - DNA, 476 bp, Homo sapiens
  misc_feature (1)...(476): n = A,T,C or G
aggattagagaccctantanaaactgagaccntagtacatgtcgtggaattccttaccaacaaaacactcctgaggagaaagaaagagagggagggagagaaaaagagagagagagaaacaaaaaaccaaagagagagaaaaaatgaattcatctaaatcatctgaaacacaatgcacagagagaggatgcttctcttcccaaatgttcttatggactgttgctgggatccccatcctatttctcagtgcctgtttcatcaccagatgtgttgtgacatttcgcatctttcaaacctgtgatgagaaaaagtttcagctacctgagaatttcacagagctctcctgctacaattatggatcaggttcagtcaagaattgttgtccattgaactgggaatattttcaatccagctgctacttcttttctactgacaccatttcctgggcgttaagtttaaagaactgctcagccatg

SEQ ID NO: 35495 - DNA, 487 bp, Homo sapiens
  misc_feature (1)...(487): n = A,T,C or G
agcgtnccnnnnattcgatgtcctacgtagtgtggtggaattccatgtgaagaaggatgtgtttgcttccccttccaccatgattgtaagtttcctgaggcctccccagacatgctgaactgttgaaagcctccacaatcaagcttttattaaagaacgagtactaccattgtgaccacagaagatagaattcgacaccaagagcgtgctggcccttctcaaagtgtcccatgaaaaagttattccacacctcctccctgaccttgtcgtgcagacgcttccaggatgaactccaactcgccgagccaccgcagctcctcagctgactaaaagagttaatgatcctccaggttaaaactcctccttgagcacacaccttctctcaacaaatgacaatacttggcaaactgaactcctcccacgagtcgccctctgctaggaggaattgctggctgctccctgcttattgcattctctcagagcagct

SEQ ID NO: 35496 - DNA, 438 bp, Homo sapiens
gaaaggtactgtgaccaccacttgcttggctctccaacttcctcccccatttccctcttgactcctgtttgccataacaccttctgtcccctagccttgcctcaggtccccgacgaatcctgcccttaatctgtgggggtggtaggtggcactgtatctggagcttactggatctccctcagtgagtcagcctggagttgtgtttgaaaaccacaggccctgactgtggctgtcagacctcccagacaccacctgctgctgcctatcatcatcttcaggtgctgggctcccctgtgggcctcgtctgcccgccctctgctgcagctgtcccatgggcgcccgccctctctgacaccacaagagagcccatctagattccaggaaaaaactcatctttatttgccttcttcccactgaagaacaggcctgagggagagg

SEQ ID NO: 35497 - DNA, 394 bp, Homo sapiens
  misc_feature (1)...(394): n = A,T,C or G
ggcgcggtggctcatgcctgtaatcctagcactttgggaggctgaggcgggcagatcacttgaggttaggggttcaaaaccagcctgaccaacatagtaaaaccccgtccctacaaaaataaaaaaataaaaaaaataagccaggtgtggtggtgggcacctgtgatctcagctacgtgggaggctgaggcaggagaatctcttgaacctaggaggcagaggttgcagtgagccaagattgtgccagcctgggcgacagggtgaggctcttgtctcanaaaaaaaagtccacatcttcatgaaccctcaaactctggagttgggtgtcggcttttttagccagcttttgtgggaattgcctttgacctattaaagaaggaaagtgggtaatgag

SEQ ID NO: 35498 - DNA, 485 bp, Homo sapiens
  misc_feature (1)...(485): n = A,T,C or G
gggggntnnnatttgatgatcctacgtagtgtcgtggaatttcaaaagcccagggggcattcaaccccatgtttctagaactctgttcctgctgctgctgttggcagcctcagcctggggggtcaccctgagccccaaagactgccaggtgttccgctcagaccatggcagctccatctcctgtcaaccacctgccgaaatccccggctacctgccagccgacaccgtgcacctggccgtggaattcttcaacctgacccacctgccagccaacctcctccagggcgcctctaagctccaagaattgcacctctccagcaatgggctggaaagcctctcgcccgaattcctgcggccagtgccgcagctgagggtgctggatctaacccgaaacgccctgaccgggctgcccccgggcctcttccaggcctcagccaccctggacaccctggtattgaaagaaaaccagctggaggtcctggagg

SEQ ID NO: 35499 - DNA, 441 bp, Homo sapiens
  misc_feature (1)...(441): n = A,T,C or G
catttccactctagttgagttctgcagcatgcagcggtatgaccctacgggggtcaggagagccctgtggcccccacccaccagctcagaacctgtcactaatacagctgcctgtgaccctgggacccacaaccttccagctgcttccctttgtcaaagtcacgagtgcgtctgccttgacagccctcgtcaacagaacttccagtgggttgtgggttcatttcctttctttttaagaacagggttgggaccttttctgcccctgccccttagctactgaggcatagggagaggaagttaatttcagagccatacaaaaataagccacaaccagcttcagaattaattcccaatcccccattccaccagggctgggagcccattcccagtgcttcccaaggccctcggggacatctaccgccaacccagctgcttctggcn

SEQ ID NO: 35500 - DNA, 486 bp, Homo sapiens
  misc_feature (1)...(486): n = A,T,C or G
tgggnctnnnaatcgatgaccctacgtagtgtcgtggaattcggcactgtagattctagatagggaagaggagcctcggtatgtaaactctgaaccaagggcaggtccttggagcttcttcatgcgggtgcaaaaggcagttgcaatgacagagaatagagggtcctgaaatattgctgtactacatgactcttcctactctccccccactccccgcccctatcatccttttctgggctttgcctgggggtccgtgagctggtgccatcacaagtagactagacccagagagtgccctcagctcaccagccactgagcgcagggccctaggtccagccctacagaaaacgcagcaaggagagaccctagggagtagtgagtatagatgagggaagggactcanggaaggaatggcctgctgagtagtcagcggtgcttaagaaggcttcctggaagaggtatcccttgagcaaggcctaggatgan

SEQ ID NO: 35501 - DNA, 228 bp, Homo sapiens
aacagctggcaaggggggcagagaaggcacaggaaggagccctcactctggctgtccaagccgagtccatccctgaggcgccccttcagcctgacaaacacgatggtgacaaatatcccatggaaagtgataattcatttgatctgtttgattcctcccaggcagtgacaccaaaatcagtttcagagactcctccactctctgggaatgacacggactccctctccg

SEQ ID NO: 35502 - DNA, 480 bp, Homo sapiens
  misc_feature (1)...(480): n = A,T,C or G
gggggcggggnnnnaatcgtagaccctagtccgtgttgtggaatccgtggacgccacgatgcatggcaatgccgcccgcttcatcaaccactcctgtgagcccaactgcttctctcgggtcatccacgtggagggccagaaacacattgttatcttcgccctgcgccgcatcctgcgtggtgaggagctcacctacgactacaagttccccatcgaggatgccagcaacaagctgccctgcaactgtggcgccaagcgctgccgtcggttccttaactgaggccgtggctgcccaccacgacccctcacacctcctgctgccgtcgctgccatcttgcccctagcctgggggctccctagcccctcccagagcatctcacccccacccttcatgttcagggtgatgtgggcatgcaggtgacaagggccctgcctccacccctccagcccatncagcaatcgccccctttctgccctggg

SEQ ID NO: 35503 - DNA, 447 bp, Homo sapiens
  misc_feature (1)...(447): n = A,T,C or G
cganagctaccttgtgttgcagcaaagatctaccgaaatctctacagagaaggcagcggtattggggccattgactctaacctggactggtctcacaatttcaccaacatgttaggctatactgatcatcagttcactgagctcacgcgcctgtacctcaccatccacagtgaccatgagggtggcaatgtaagtgcccataccagccatttggtgggcagtgccctttccgacccttacctgtcctttgcagcagccatgaacgggctggcagggcctctccatggactggcaaatcaggaagtgcttgtctggctaacacagctgcagaaggaagttggcaaagatgtgtcagatgagaagttacgagactacatctggaacacactcaactcaggacgggttgttccaggctatggccatgcagtactaaggaagactgatccg

SEQ ID NO: 35504 - DNA, 507 bp, Homo sapiens
  misc_feature (1)...(507): n = A,T,C or G
agggnnntcnnnnnnaatcgatgtccctacttagtgtggtggaattcccccgcggagccgcagccgggacgacctctatgaccaagacgactcgagggacttcccacgctcccgggacccccactacgacgacttcagggctcgggagcgccctcctgccgaccccaggtcccaccaccaccgtacccgggaccctcgggacaacggctccaggtccggggacctcccctatgatgggcggctactggaggaggctgtgaggaagaaggggtcggaggagaggaggagaccccacaaggaggaggaggaagaggcctactacccgcccgcgccgcccccgtactcggagaccgactcgcaggcgtcccgagagcgcaggctcaagaagaacttggccctgagtcgggaaagtttagtcgtctgatctgacgttttctacgtagcttttgtattttttttttaatttgaaggaacactgatgaagccctgccatacccctcccgagtt

SEQ ID NO: 35505 - DNA, 480 bp, Homo sapiens
  misc_feature (1)...(480): n = A,T,C or G
ggtatggcccccccccnataaaaaccactgagaccatcggacangcggnggaantcgaataatagtaacttgacagtggagagacctggcagacaccaccttcatcaactgattaaagttaacatcgccagaaaggggacagatggcatgtgcctctcgataagatgcactgaagacacacactcacttctgcaatattcctgccaagaatgcctcatctgaatctaatctcgagtataaccatcagacaaacccaaattgagagacagtttacaaaacaccagccttgtactctgcttaatatgtcaatatcacaagagagaaagacagactgaagagctgatccagactgaagaaggctcgagattaatgcaaaagctgatctgggattgcatcttggacctcaactctcccctttttattgttaagggacactactgggacaattttttttttttttcgttttgagacagggcctcg

SEQ ID NO: 35506 - DNA, 436 bp, Homo sapiens
gggagggatctgcttctgggttaccccatgcctccccttctcaagtactactttttaatcatcatggctcctgccattcatttcatagttgatgtaagccaggtgcggtggctcacgtctttaatcccagcacttggggaggctgaggccaggaggatcactcgaggccaggagttcaagaccagcttgggcaacatagtgagacccccgtctctacaaaaaaacaaaaacagttagtcagacatcgtggtgctcccctatagtccagctactcaggaggctgaggcaggaggattgcttgtgcccgggagttcaaggctgcagtgagctatgcttgcaccactgcactctagcctgggtgacagagcaagaccctgtctcaaaaataaataaataaaaaaaatagtagaagtaagatctagaatgtagcacaggt

SEQ ID NO: 35507 - DNA, 485 bp, Homo sapiens
  misc_feature (1)...(485): n = A,T,C or G
aggggtcnnnnatcgagtagcctacgctagtgtcgtggaattcctgggctcccacaagaacattaaaggatgtcgtttggggattaaactctttgtttactgatcttttgaattttgatgatccactgaatattgaagctgcagaacatcatttgcgggacaaggaggacttccggaataaagtggatgactacatcaaacgttatgccagatgataaaaggggacgattgcaggcccatggactgtgttacagtttgtctctaacatgaaacagcaagaggtagccccctctcccgtcctcatgctccctctcagtcccctggattgccccagtcctgtgaccatgttgccctgaagaagaccatcttcatgactgctcattgtagatggagaattcaacataaatacagcaagaaaatgtgtttgggcttctgaagagttgtctgcttaccttaacatgtttacttttttgaacttgtactgg

SEQ ID NO: 35508 - DNA, 454 bp, Homo sapiens
  misc_feature (1)...(454): n = A,T,C or G
attgagnatcgatgacatctagcccagngcggtggaattcgagacggggtttccccacgttgaccaggctggtctcgaactcctcaccttaagtgatccacccgcctcggcctcccaaagtgctgggattacaggcgtgagccaccgcgactggcctacacagcttttaattgcttgatttatactttattaaagagaggaagcacaatgagcagtgatactaaaatataactaatatggcatgtgaaagtgatcattattcagatgatcttcaccaacactgcatttgcatatatctgaccaaactttatgcgacataggcaggtctctggcacttcaaaaatgaatgttaaatagaaaataataaataatagctgattagggtaatcatttatttaatcagaataaagattatatccataaaatttacttgcagagaagtactttctttttg

SEQ ID NO: 35509 - DNA, 451 bp, Homo sapiens
  misc_feature (1)...(451): n = A,T,C or G
tttgaatactagaccactcgcaagngcggnggaantcggagggggtactctgtgctttgccaacaggtgtgcagcaatgacaacatttccttttactcttcctgccacttctttgccacaaagtgcaccctggagggcaccaagaagggccacaagctccacctggactacatcgggccttgcaaatgtgagtgtccttgggcccttccagactcctgtcttggggagagagctctgagctggcactgatgctgtctctgccacccccatgctgggtgatcttgggcaaatctctctccctttctgagtctcggcatccccatttataaaatgaggtaattgtctatgagttggctcctctcaactctgagttcagggcactttctggggaaggactgagcgattatggaaggtcaacatcagggaagatttctggagtctctcactagcg

SEQ ID NO: 35510 - DNA, 451 bp, Homo sapiens
  misc_feature (1)...(451): n = A,T,C or G
tttgagatcgatagccatgcganggacttcggnggngctacaactatgccacctgcctggaaggagccctgaaaattaaagagatattctacatgcactcagaaggcatcctggctggggagctgaagcacgggcccctggcactgattgacaagcagatgcccgtcatcatggtcattatgaaggatccttgcttcgccaaatgccagaacgccctgcagcaagtcacggcccgccagggtcgccccattatactgtgctccaaggacgatactgaaagttccaagtttgcgtataagacaatcgagctgccccacactgtggactgcctccagggcatcctgagcgtgattccgctgcagctgctgtccttccacctggctgttctccgaggatatgacgttgacttccccagaaatctggccaagtctgtaactgtggaatgaggctg

SEQ ID NO: 35511 - DNA, 459 bp, Homo sapiens
  misc_feature (1)...(459): n = A,T,C or G
catcgatgaccattagtccagngcggnggaattcttaagcttgggccctgactcttctttgtgagaaggtacagagatggaaaccttacaatccgagactaaaacgagggtccttccctcatggctgacagcccaggtggctacaaagaatgtggcaccaatgaaggcccccaagaggatgagaatggcagcagtgccagtggcagcagcaaggtgcgacagctctggtcagaagactcctgcgaatctgactccctgcgacaaggactgtgtactgcatgaatgaggctgagatagttgatgttgctctgggaatcctgattgagagccgcaaacaggaaaaggcctgcgagcagccggccctggcgggggctgataacccagagcactcccctccctgctccgtgtcgcctcacacaagttctgggagcagcagtgaggaagaggacagtgggaaac

SEQ ID NO: 35512 - DNA, 507 bp, Homo sapiens
  misc_feature (1)...(507): n = A,T,C or G
agggnnnnnnnnnnntttgttctacatccctagtcagtgtggtggaattccatagtttatatagctgtgtccgcctatccatactaaggaactctccaaagcctattccacatatttaaaccgcattaatcatggcaatcaagcccccttccagattactgtctcttgaacagttgcaatcttggcagcttgaaaatggtgctacactctgttttgtgtgccttccttggtacttctgaggtattttcatgatcccaccatggtcatatcttgaagtatggtctagaaaagtcccttattattttatttattacactggagcagttacttcccaaagattattctgaacatctaacaggacatatcagtgatggtttacagtagtgtagtacctaagatcattttcctgaaagccaaaccaaacaacgaaaaacaagaacaactaattcagaatcaaatagagtttttgagcatttgactatttttagaatcataanattagttact

SEQ ID NO: 35513 - DNA, 452 bp, Homo sapiens
  misc_feature (1)...(452): n = A,T,C or G
ntttgagatcgataggcagtgcggnggaattcatttagagttaataagggttttatatctcttctgtccatattgttttcaaaggaatgaggtgtttaggtggctggaaaagcatttgtaggaagttagatttgaatatagacaaggtgggttattcacgttgagaatgttatttgaagaatgcctgtgaagccaggtgtgggttctactcagtgccatagatagactgagtcttctctcgtaggttaccattacatagtaattttgattctgaatttcacattaaattatttgagtttatacagacctaaattttaaaatctgtacatatattattttgatgtattaagatgaatattgctgatttaaattttatttatgcacatacttaaaggacagaaatgtctgggaaagtaattggtaaataatgatatgtaactttttaacttttt

SEQ ID NO: 35514 - DNA, 384 bp, Homo sapiens
ctctgatcatactcactgggtcagcaacaccctactgaccttgtccagaatcccacatcccggttgatatcagggcaatcagtttcctggctgttttccccaatatcaacccgggcttacagaagacagtcaccacagagctcctgccaggagttcactcattcgtgcatttcttcctttttttttttctttttgagatggagtctcgctctgtcgcccaggctggagtgcaggggagcgatctcggctcattgcaacctccgcctcctgggttcaagcgattcttttgcctcaccctcccaggtagctgggatagcaggtgtgtgccaccacgcccagctaatttttgtatttttagtaaagatggggtttcatcatgttgcc

SEQ ID NO: 35515 - DNA, 477 bp, Homo sapiens
  misc_feature (1)...(477): n = A,T,C or G
cccccccccccncnnnnttcgtagtcatagtccacgtcggggaattccataacaacactagaagaaggtgttagcccagctaactttgcttctgggaaggctatgtctgaacatgttgctctgtaggataatcacacttagaaaacatctgctccatgacattcacaataccagggaccatgggagacacaagaaatgtgtgtctgctgtcataacttacagtgaaaaagcccaataatacagaacaagacatgatgggcaataccctagcatattgggattaagagctttctagccagaatctggacctataccatgggaaaatttaagggtgctgggaatcccaaagccaaggttctggcttcattggcaacccactaggaacttgaatgtgagattcagctctagtttgcaccttgatttccccagtgaaaagggagaagagccaaagtattgtctaggtgctgagttcccttt

SEQ ID NO: 35516 - DNA, 459 bp, Homo sapiens
ataatgttgaaagcctactcaggaataatcttccttaactctttaaatttttatttcatgtgaagtgttttcagtttagttattcactgaattgtcagtttccttcatttggtattacatatttaattcttaaatattgaggccccattgtgagtaataaaaaatacgacataagtagaagactaagaagggcttgtcatattatctttgtgtatatgcttcatgttatttaaccagaaatgtcttatctctaaaaatttttagtagtaattatttaccaaacttaaaaacatttctataaatataaagcttttctttatatttaagacaaaatataaaggctagaatttggttccttctctgtaacactaaatattttagtgtgaaattgaatttttttattactatagtcttttcaatctataatttgtggttttaatttcttgatatgtcacttct

SEQ ID NO: 35517 - DNA, 441 bp, Homo sapiens
  misc_feature (1)...(441): n = A,T,C or G
ngggttnnnnnnaatcgatgacactactccagtgcggtggaattccttgaagaacgccgcaggcgattcgtggaagcctgcagagcaagggaagcagcgtttgatgccgaatatcagcgaaatcctcacagggtggacctcgatattttaacctttacgatagctctgactgcctctgaagttatcaaccctctgatagaagaacttggttgcgataagtttatcaatagagaatagttatgtggtgacactacttcaagagaacctctgcattccagtcataccaatcctgcaacttgattttcagaagtcaagagtatatcgcgataagacagtgcacaggtggaggggaaaaaaagggggagggggaagcttatcttgaaaaagcatcacagaagtagaaaaaaatgtcgaaagcattataactgtaacgttctttga

SEQ ID NO: 35518 - DNA, 395 bp, Homo sapiens
ctttcagtgaacctgtagactagtccagtaatacttattaaaattagttgttagaggctgggcatggtggttcaagcctgtaatctcagcactgtgggaggccaaggcggacagatcactcaaagtcagaagttcgagaccagcttggccaacatggcaaaaccctgtctctactaaaaatacaaaaattagttgggtgtggtggcacatgcctgtaatcccagccactcgggaggtgaaggcacaagaattggttgaacctgggaagcagaggttgcagtgagctgagattgcactgctgcactccagcataggcgtcagaataagactctgtcttggaaagaagaaaaaaaattgttagcctaaaaccaactctctctaaatttaaaagagtg

SEQ ID NO: 35519 - DNA, 386 bp, Homo sapiens
cttaaccggacggcctaccaggcctgtggccgtgcgcgggaagagcactgcagcccaggcccaagccagcccggagagaaaagacctgaggaggtggccctggggctgcaccaccgcctcccagcactgggaagagccctggggcacagcattcagcaacgagcgacctccacagccaagacttggtgggacagatatgaagagtttgttggactcaacgaggttcgagaggcccagggaaaggtgacagaggctgagaaagtgttcatggtggctcgagggcttgtccgagaggctcgggaggacttggaagttcaccaggccaagctgaaggaggtgagggaccgcttggaccgtgtctccagggaggacagtcagtacttgga

SEQ ID NO: 35520 - DNA, 476 bp, Homo sapiens
  misc_feature (1)...(476): n = A,T,C or G
aggagtgcccgnnttagannccatagtagaccttagtccagtgcggaggaattcaacgcatttttgagcctccacctcccaaaaaacagaatggagcaattggaagaaaggtagttgtgtcaactaacatagcagagacgtctttgacaatagatggtgtggtgtttgtgattgatcctggatttgcgaaacagaaggtctacaatcctcgaatcagagttgagtcccttttggtgacagctattagtaaagcttcagctcagcaaagggctggtcgagctggacgtaccagacctggaaaatgcttcagactttacacagagaaagcttataaaacagaaatgcaggataacacctatcctgagattttgcgttctaatttaggatcagttgtgttacaattgaagaaacttggtattgatgacttggtacattttgattttatggatccaccagctcctgaaactctgatgaga

SEQ ID NO: 35521 - DNA, 422 bp, Homo sapiens
aacatccaaggcaagactggcacccagcacagcagtgactgaccacataccccactctccaggacccatggagtccttcagctcaaagagcctggcactgcaagcagagaagaagctactgagtaagatggcgggtcgctctgtggctcatctcttcatagatgagacaagcagtgaggtgctagatgagctctaccgtgtgtccaaggagtacacgcacagccggccccaggcccagcgcgtgatcaaggacctgatcaaagtggccatcaaggtggctgtgctgcaccgcaatggctcctttggccccagtgagctggccctggctacccgctttcgccagaagctgcggcagggtgccatgacggcacttagctttggtgaggtagacttcaccttcgaggctgctgttctggctggcc

SEQ ID NO: 35522 - DNA, 489 bp, Homo sapiens
  misc_feature (1)...(489): n = A,T,C or G
ggggnncggagcccgcgcccccaatagagatcatagagcagcgtcgnggaantccccggctcaccagcccaaacagggtgcagttgaagcactgtacaagtttgtggttcctataccccgcagtgaatgttcaaagccagagcagctggttgtaacatttgtagcaggttacatagctggagtcttttgtgcaattgtttctcaccctgctgattctgtggtatctgtgttgaataaagaaaaaggtagcagtgcttctctggtcctcaagagacttggatttaaaggtgtatggaagggactgtttgcccgtatcatcatgattggtaccctgactgcactacagtggtttatctatgactccgtgaaggtctacttcagacttcctcgccctcctccacccgagatgccagagtctctgaagaagaagcttgggttaactcagtagttagatcaaagcaaatgtggactgaatctgcttgttgatcn

SEQ ID NO: 35523 - DNA, 468 bp, Homo sapiens
tgtcgcagaccactagtgagtgtcgtggaattcctgagaggcagcgaactcatctttgccagtacaggagctcgtgccgtggcccacagcccacagcccacagccatgggctgggacctgacggtgaagatgctggcgggcaacgaattccaggtgtccctgagcagctccatgtcagtgtcagagctgaaggcgcagatcaccctcaagagcggcgtgcacgccttccacctgcgtttggctgtccacccgagcggcgtggttctgcatgacagggtcccccttgcctgccctggcctgggccccggcggcacgggcctgctggtggtggacaaatgcgactaacctttagcatcctggtgaggaataacaagggccgcagctgcacctacgaggtgcggctgacgcacaccgtggcccacctgaagcagcaagtgagcgggctggagggtgtgcacgacgacctgt

SEQ ID NO: 35524 - DNA, 470 bp, Homo sapiens
  misc_feature (1)...(470): n = A,T,C or G
ntcgagnnccnttttcgagatcactatccatgtggtggaattcgacctggagcctggcagtgaggggcccgacttgactgacattgtgatcacatgtagtgaggacactactgtctgtgtcctagcactccctacaaccacaggctcagcccacgcactcacagctgtttgtaaccatatctcctcggtacgtgctgtggctgtgtggggcattggcaccccaggtggccctcaggatcctcagccaggcctgactgcccatgtggtgtctgcgggggggcgggctgagatgcactgcttcagcatcatggttactccggaccccagcaccccaagccgcctcgcctgccatgtcatgcacctttcgtcccaccggctagatgagtattgggaccggcaacgcaatcggcatcggatggttaaggtagacccagagaccaggtaatatatgctcctgggcagggtgtggt

SEQ ID NO: 35525 - DNA, 482 bp, Homo sapiens
  misc_feature (1)...(482): n = A,T,C or G
agagctgcccccnttagaaaccactgagancatcggacangcggnggaantctgaacattgaagatatgctttgtaaagtacaggaggaaatggcaaggattaaggagctaggcctttggcgctcgttaggacagtggactattcagcaacaaaaaacccaagacgaaatgaaagaaaatatcatatttctgaaatgtcctgtgcctccaactcaagagcttctagatcaaaagaaacagtttgaaaaatgtggtttgcaggttctaaaggtggagaagatagacaatgaggtccttatggctgcctttcaaagaaagaagaaaatgatggaagaaaaactgcacaggcaacctgtgagccataggctgtttcagcaagtcccataccagttctgcaatgtggtatgcagagttggctttcaaagaatgtactcgacaccttgcgatccaaaatacggagctggcatatacttcaccaagaa

SEQ ID NO: 35526 - DNA, 479 bp, Homo sapiens
  misc_feature (1)...(479): n = A,T,C or G
nttcgagacccctttcgtagaccctgaanagggcgcgggaanccagtgcccgcaaccacgcccggctcatttttgtattttttgtagagatggggtttcaccatgttggccaggctggtctcaaactcctggcctcaggtaatctgcccacctcagcctcccaaagtgctgggattacagctgtgagccaccgcacccggtcaaattcggtgttttaagccactgagtttgtatagcttgttatagcagcaatagggaagagatacatatggctttgtctatagaaagatattgcttaaataaaaagaagaaaacccttccaggtctacattttctcaagcagtgcttgcgctttaaggagcacgtgcaggatatttacatcagcagcaagtatatgaatcgtagcctagtctcatcgttagaggtgcataaactcaaggtaagcataccctaagtttccgctcaaggtcataccctgg

SEQ ID NO: 35527 - DNA, 395 bp, Homo sapiens
  misc_feature (1)...(395): n = A,T,C or G
gccatggcgtcctatttcgatgaacacgactgcgagccgtcggaccctgagcaggagacgcgaaccaacatgctgctggagctcgcaaggtcacttttcaataggatggactttgaagacttggggttggtagtagattgggaccaccacctgcctccaccagctgccaagactgtggttgagaacctccccaggacagtcatcagaggctctcaggctgagctcaagtgccccgtgtgtcttttggaatttgaggaggaggagactgccattgagatgccttgccatcaccttttccattccagctgcattctgccctggctaagcaagacaaattcctgtcccttgtgccgctatgagctgcccactgatgacgacacttatgaggagcacan

SEQ ID NO: 35528 - DNA, 452 bp, Homo sapiens
  misc_feature (1)...(452): n = A,T,C or G
aatcgagattcgtaggccatgcggnggaattcccttgcagtagcagaggcaatgacatgagtttgttttctcattaatatgaccagtttgggtctatgttggttcacatgtacatctactttatatgaaagaaaaaacagttgtctgcctgtaaaatgttgagtttcgattgagccatgtttggagattttattactattctgaagggtagtgttgttggttttcatcttcaagaagttgattccaaaactgagttatgaagaatgatataacagttccttcaaaatcggcctaggaaataaaaccttaaaaggacactggtgtgctactttgtcttaatttgggcttttctgtttcagtttgccacctccagctgtgaaatggactgcagtccaccctaagtactgtgcacagtatctccctgtgtgtgtgcacagtggcttccccttaca

SEQ ID NO: 35529 - DNA, 492 bp, Homo sapiens
  misc_feature (1)...(492): n = A,T,C or G
attcgtgatccctcgttcagtgtggtggaattcggttttccagtttagtagtggagtttcttgaggctaacttacagaaatttctaactgaaaactttaagagttattgatacttgttttttcagtcagtcacttacatcacctagcctactctctggaatttaaatttatttctctaggctggtcctggaagttgataaccttttggcaaagcttagatttaggagaaggcttgagtccctgttcagcgggtctgtggattctctttgcttatggctctctgcctgcagccctggcagaccatactgtatgtcatggatacccagtggaaatattactgagatgaaacacatttccgagggtatttaaactctcactctgccacctttctaagggtgggaggctggcagagatgctgcaatgcttgataatcatttggccacactgaaatttccaaagggagctcttgccggtgcttataaccaaaactcn

SEQ ID NO: 35530 - DNA, 457 bp, Homo sapiens
  misc_feature (1)...(457): n = A,T,C or G
ggngaattgtgaggcggactgcgagggaaagggggccttgttgagtccgccaggattctaccatcagaaaagaggccaaacttctatcatcatggtggatgtgaagtgtctgagtgactgtaaattgcagaaccaacttgagaagcttggattttcacctggcccaatactacgtgggctgcaagagcaccaagcaccagaatcacatatgggactatcaccaaagagagagactactgcgcggaagaccagactatcgagagctggagagaagaaggtttcccagtgggcttgaagcttgctgtgcttggtattttcatcattgtggtgtttgtctacctgactgtggaaaataagtcgctgtttggttaagtaatttaggagcaaagcaatgctccaagcgaggcctcctgcttcaggaaagaaccaaaacactaccctgaagggccagcctagn

SEQ ID NO: 35531 - DNA, 479 bp, Homo sapiens
  misc_feature (1)...(479): n = A,T,C or G
cccccccccccncnnnnttagaaaccatcgtagacactagtcagtgcggtggaattcgtactctcaggatctggcacagaacccgacaaaggaaatatttaatgaactatggcgtaggcctggccctgaacgacaccctggggacccagcagcagcaaggtgcagcttctgccctcagcaacctcacggtctaatggacgcggcacagtgggcaggaagtgacaccaaagagcatcaggattaggaagtctgttcggattagcatggaatcagagactccctgccctgggaatcattgctggccatggcagttgctgagactgggagctaaaaggtgcatctgagttggagtcttgtcatgttccttcagcagactctctggagcagcccagcttcccagaactgagatcactaaaccaagaagaggaggcaccttggacctgggtaaaggctcctttccaagctactgcacaaagagg

SEQ ID NO: 35532 - DNA, 494 bp, Homo sapiens
  misc_feature (1)...(494): n = A,T,C or G
nattgatgaacactcgtccagtgtcgtggaattcgaaagtctgaatggttggatccttcccagaagtcacctcttcatgttggagagacaaggaaagaggatgaccccaatgaggactggtgtgcagtttgtcaaaacggaggggaactcctctgctgtgaaaagtgccccaaagtattccatctttcttgtcatgtgcccacattgacaaattttccaagtggagagtggatttgcactttctgccgagacttatctaaaccagaagttgaatatgattgtgatgctcccagtcacaactcaaaaaaaaagaaaactgaaggccttgttaagttaacacctatagataaaaggaagtgtgagcgcctacttttatttctttactgccatgaaatgagcctggcttttcaagaccctgttcctctaactgtgcctgattattacaaaataattaaaaatccaatggatttgtcaaccatcaagaaaagactaca

SEQ ID NO: 35533 - DNA, 458 bp, Homo sapiens
  misc_feature (1)...(458): n = A,T,C or G
attgacnatcgatgaccattagcccagngcggtggaattccaatgccaacaacaccagagtacaggatctcttctgttctgttggccttaatgttaacaaccctcactttctcatcatgcagggccgaattacaaaagtattgaatatgaaacctccagagattttatccatgatagaagaagcagctggaaccaggatgtatgaatacaaaaaaatagctgcacagaaaactatagaaaaaaaggaggctaagctgaaagaaattaagacgatacttgaagaagagattactccaaccattcaaaaattaaaagaggaaagatcgtcctacttggagtaccaaaaagtaatgagagaaatagaacatttgagtcgtttatatattgcttatcagtttttgctggctgaagataccaaagtacgctcagctgaggaattaaaagaaatgcaagataaa

SEQ ID NO: 35534 - DNA, 221 bp, Homo sapiens
  misc_feature (1)...(221): n = A,T,C or G
ctggcgagattgtaaaaaatatgtgaaacagctttggtgcttagaatattaagtctgatagaacagtggttcttaattctgggatacatcaaaagtatcaaaaattaattatacaagcatggggcggacatggtggctcacgcctgtaatcacagcactttgagaggcagaggtgggaaggatactttgggccaggagtcggagaacagcctgggcaacan

SEQ ID NO: 35535 - DNA, 507 bp, Homo sapiens
  misc_feature (1)...(507): n = A,T,C or G
aggccnccnnnnnnaattgatcgactttcactagtccagcgtcgnggaattcgccaacatcatcagagatgaactgttcttaccagaaacttctctgctcctgacaccccacctctccccagaagagaagaaggagagtggccacgttgattcagccaagcacctccaggaggtcccctctggatgtcccatgaggctgcccctcagccacagcccagagcacgtggagatggctttgctcagcaacatcctagcggcctattcctttgtctcagaaaatcctgagcgagcagctctgtactttgtttctggcgtgtgcatcgggctggtgctgaccctggctgctctggtgataaggatctcttgccacacagactgcaggcggcgtcccgggaagaagttcctgcaggacagagagagcagcagcgacagcagcgacagcgaggatggcagtgaggacaccgtgtccgatctctccgtgcggagacaccgccgcttcgagaggac

SEQ ID NO: 35536 - DNA, 500 bp, Homo sapiens
  misc_feature (1)...(500): n = A,T,C or G
gtggnttnnnnnnaatcgttatcctcttcatnggcggaattacatggcggagcgcggcaggaagcggccgtgcggcccgggtgaacacggccaaaggattgagtggcgaaaatggaagcaacagaagaaagaggagaaaaaaaaatggaaggatctcaagctgatgaaaaaactggagcggcagcgggcacaggaggaacaggcaaagcgcctggaagaggaggaggcagcggcagagaaggaggaccgcgggcggccctacacactgagcgtagccctgccgggctccatcctggacaatgctcagtcgccggagcttcgcacctacttggccggtcagattgccagagcctgtgccatcttctgtgtggatgagatcgtggtgtttgatgaggagggccaggatgccaagactgtggagggggaattcataggagttgggaagaaggggcaggcgtgcgtacagctggccccgatcctgcagtacctggagtgtcacn

SEQ ID NO: 35537 - DNA, 424 bp, Homo sapiens
caactgagttgtaagacgttcatcgccgtgttatccttgagtaaagaagcgggcttttgccatgttgtccaggctggtctctactcctgggctcaagcagtcctcctgcctcagtctcccaaagtgctggaattacagggaatgaactctggaagcccagccagggacaatgcaccttcacagagattctgcactaatctgagtgaaggtctaaggtttggaatctccccctcatggagagaagctttgtatggctgtcatgcttagacagtgattcctgcaacttgaccttcaggctgggagaggtggagagccatgcctgttctccttccttgctatggaatttgctgacacaatatcttccgcctggtgctgggcatatcctaagaacttacaactttcctgtattatcctgtgtgagcag

SEQ ID NO: 35538 - DNA, 456 bp, Homo sapiens
  misc_feature (1)...(456): n = A,T,C or G
catcgatgacattcgtccangctggggaattcagacaggccacatcagtatgctattaagctgtctttagtccacaatttactaccatcacttcaacttttctttagaactgaaaacagtatatgactgaatgccaccttcttgaattatttggctagaggatggtattaaacagaagggcaatatctccaagtgagttcttatggaggaaaactgccccagagccatggtgtctccctgttcaagatggcagatggttcagggcagactgagaggtgcccctcaagtgtcctgcctctatggctttatctttgcatatgtggcactgtcagctcaatggcacgacagggctgctctgctgctcttcgatgtagaggcttgccaggggaaataggcacacagatgcagcctccttcctaaccctcaactggcatctattttgtatcccttgagctc

SEQ ID NO: 35539 - DNA, 440 bp, Homo sapiens
gcgctggtttcacatcttgatgataatgagagaagtgatatttttgatgccatgttttcggtctcctttatcgcaggagagactgtgattcagcaaggtgatgaaggggataacttctatgtgattgatcaaggagagacggatgtctatgttaacaatgaatgggcaaccagtgttggggaaggagggagctttggagaacttgctttgatttatggaacaccgagagcagccactgtcaaagcaaagacaaatgtgaaattgtggggcatcgaccgagacagctatagaagaatcctcatgggaagcacactgagaaagcggaagatgtatgaggaattccttagtaaagtctctattttagagtctctggacaagtgggaacgtcttacggtagctgatgcattggaaccagtgcagtttgaagatgggcagaagat

SEQ ID NO: 35540 - DNA, 486 bp, Homo sapiens
  misc_feature (1)...(486): n = A,T,C or G
agagggttnnntttgatctgcgtacactagtgcggtggaatggcacatacaaaggatacattagtaccctttatcatcatttgggttattaatagccctctctgtgtcagaaataattgaggcagcttcttaacaaaccaaccactactagagaatacattctaaagagactttgtataaatggcaatgggcttatattgaattaaccacatttattcacacttactctttgtgaaaagcttattgatcttttgggatgcacattttcgacttgttcagataaacatgttcaaaccagaagtattcgctgcccccagctctaagaatcttgtttgctgttttcaggactgggtcatatagattatagcatcttttaataatgaggcaaaagaccgagaaaatgtattgtctaaagcacaaaggacttttttttctttttacccattctttcccaacatctgccataactgcatccatctctgacaa

SEQ ID NO: 35541 - DNA, 488 bp, Homo sapiens
  misc_feature (1)...(488): n = A,T,C or G
cgcgnnctnnnnattcgattgcgctacactagtgncgngcaattctatgtcttcagctggtatcatgaattaccaaggatccataaagctaccagctcctcgctaagtgaacctgagaggcggaaaggcactatttcacaatattttactaccttacactgtcctgtgtgtgatgacctaactcagcatggcatctgttgtaaatgtcggagccaacctcagcatgttgcagtcatcctcaaccaagaaatccgggagttggaacgtcaacaagagcaacttgtaaagatatgcacgaactgtacaggttgctttgatcgacacatgccatgtgaatctctgaactgcccagtacttttcaaactctcccgagtaaatagagaattgtgcaaggcaccatatctccggcagttattagaccagttttaaattgtcaatatcacagtattacaggagctatttttttcagtgcttaccactagactgtg

SEQ ID NO: 35542 - DNA, 493 bp, Homo sapiens
  misc_feature (1)...(493): n = A,T,C or G
tcgggctnnncctcgtgatcctcgttagtgtggtggaattccataacccaagaaggtcacagaccagaatcactggctgaaacctctggcagtgaccaacctcaactcaaaaggtggatgcaaaggtgttaaatgaggttgaatatattgaccagaaaagaaaatattatagtcctttgttgaagaagagttttctcatactggaaagaaaaacaataaaagaaagaaacttcaaaaacttcatgctgctttctgaagtactccagccaaagaaaataattcaggtatcaagttggactagctcagatgactacaaaatgagtcttgctctgttgctcattgcaacctccacctcctaggttcaagcgattctcctgcctcagcctcctgagtatctgggactacagatatgcgccaccacgcccggctaatttttgtatttttagtagagacggngtttcacgccatgttgggcaggatggtctcaatctct

SEQ ID NO: 35543 - DNA, 447 bp, Homo sapiens
ctgctcgctggccggcagcgcaccgttttgaaggtcctagcccacctgggctggctcacgcgcacgactagccgctcccatacagcacgcccggactctgtcgtcgcttaaggccactcctattctacggctgacccctggtggtcacgtggatctgttcgccacgcaagtctgggtccttcggcgattgaccggggtccttgctgttcgggagcctctcctaagctgcctgttcgcgcgagagtttggaggggcgggtttggggtggagcgaccccattacgctaaagatgaaaggctggggttggctggccctgcttctgggggccctgctgggaaccgcctgggctcggaggagccaggatctccactgtggagcatgcagggctctggtggatgaactagaatgggaaattgcccaggtggaccccaagaagaccattcagat

SEQ ID NO: 35544 - DNA, 489 bp, Homo sapiens
  misc_feature (1)...(489): n = A,T,C or G
atcgtgaacctcgctagtgtggnggaattcggngagcgcgggtcggggcagagggtgcgccggagctgctctctgattcaggtgggcacccgttttcatcccagattcaccacaacatggcaaatctttttataaggaaaatggtgaaccctctgctctatctcagtcgtcacacggtgaagcctcgagccctctccacatttctatttggatccattcgaggtgcagcccccgtggctgtggaacccggggcagcagtgcgctcacttctctcacccggcctcctgccccatctgctgcctgcgctggggttcaaaaacaagactgtccttaagaagcgctgcaaggactgttacctggtgaagaggcggggtcggtggtacgtctactgtaaaacccatccgaggcacaagcagagacagatgtagaccctttccctccagagtcacgcacatactcgtcatcgcatcacttgggagaatggctgat

SEQ ID NO: 35545 - DNA, 457 bp, Homo sapiens
ctttggaatccagccaagtgatgcacccaaatgatccacctttcgcccactgggataaatgactcaggaaagaagagcctcggcagggcgctctgcactccacccaggaggaaggatacgtgtgtcctgctgcagtcctcagggagaacttttttgggaaccaggagctgggtctggacaaaggagtaccctgcattacgtgggatatgtgtgatcaattggggacatgcgacacacaatgagggtgtcatgacaatgcatgacacgtacggttatatgtggcagtgtgaccccttgacatgtggcgttacatgaaagtcagtgtggcacgtgttctgtggcatgggtgctggcatcccaagtggcaggatacatgattgttggtctatatatgacacatgacaaatgtccatgtcacaggactcatggctggccagatgacctcaggctggcccaa

SEQ ID NO: 35546 - DNA, 438 bp, Homo sapiens
  misc_feature (1)...(438): n = A,T,C or G
ggggtnnnnnnaatcgatttccctactccgtgcggtggaattcgaaaagggctgtagttcttcccccacctgtgaagtctgcatgctggattcgtgcagttgcccaagttctggccaggaggcttctcaccctgtttaaattgttacgaagttcgactagagaattcttctccctgtggagttttatcccttgctcctctggccaccctcccgatggatccctgtggtgccaggcaggaatgggccttctggggacccagcgagctcccacggcctttctgctgcttcctctacccctgtatttcgctctgctgagtctgacttagctccaggtaaagttggaaatttctcctgcaaacagaccttcagcctctccagtgggggggtgtgtgttcgggagaggaggatctccctttcccacttccacagttggggcac

SEQ ID NO: 35547 - DNA, 478 bp, Homo sapiens
  misc_feature (1)...(478): n = A,T,C or G
ccccgcccccccccttttgaaaccccatgatgacctcggacangcggnggaattccgagtatcaggaagaaatgaaagccaactacagggaaatggcgaaggagctttctgatatcatgcatgagcagatctgccccctggaggagaagacgagcgtcttaccgaattcccttcacatcttcaacgccatcagtgggactccaacaagcacaatggttcacgggatgaccagctcgtcttcggtcgtgtgattacatctcatggcccgtgtgtggggacttgctttgtcatttgcaaactcaggatgctttccaaagccaatcactggggagaccgagcacagggaggaccaaggggaaggggagagaaaggaaataaagaacaacgttatttcttaacagactttctataggagttgtaagaaggtgcacatatttttttaaatctcactggcaatattcaaagttttcattgtgtc

SEQ ID NO: 35548 - DNA, 455 bp, Homo sapiens
  misc_feature (1)...(455): n = A,T,C or G
ntttgaagaccgacaggccatngcganggaacncgaaagaaaaaggctagatttctgctttcttttgaaaaatcagattggccttgctgttcagagttagtcagtctgaacatcagtcttcctcttaaaacaagcctgagctttcctgtctgcctgccagcatgctgcaggtcacccacagggctgaactgtccccctgtactgcccactcggctaaccattgcctcctcccctcctaggtgtgctgatgtatcgggactaccccctggaactattcatggcccagtgctatggcaacatcagtgacttgggcaaggggcgccagatgcctgtccactacggctgctaggaacgccactacattactatgtcctctccactggccacgcagatccctcaggcggtgggggcggcgtacgcagccaagcgggccaatgccaacagggtctgtattn

SEQ ID NO: 35549 - DNA, 442 bp, Homo sapiens
  misc_feature (1)...(442): n = A,T,C or G
agggggtnnnntttgctcgacgacactagtccgtgcggtggaattccggagttttaccttgttggccaggctagtctcgaactcgtgacctcaggtgatccgtctgcctcagcatcccaaagtgctgggattacaggcgttagccaccatgcagcccctttcaagccttttaacatcatgtcaccttcacaatgagcagttgctcccattacccagtgaactcaccttctgatgggacagttaccctagttggggcttctcagccttgagagatgtgcagagcagggacctgtccagggcagagcagccagacagcgtggaaataatccaaacagagaaagcattcaagaacttggcctctggttgacttaacacactacttcaagtatatggcaggtctgtataataaactcctgcctgtctagtcttcagcctcatagaa

SEQ ID NO: 35550 - DNA, 503 bp, Homo sapiens
  misc_feature (1)...(503): n = A,T,C or G
aggnnntnnnnnnatcgatgatcatacttcgtgtggtggaattccaaaccgaacagtggtggacagctcagtattcccagcagaggggctgatccccccctacggcttgacagcagacacctacatcgacctggcagctgatgaggaaggtctttgggctgtctatgccacccgggaggatgacaggcacttgtgtctggccaagttagatccacagacactggacacagagcagcagtgggacacaccatgtcccagagagaatgctgaggctgcctttgtcatctgtgggaccctctatgtcgtctataacacccgtcctgccagtcgggcccgcatccagtgctcctttgatgccagcggcaccctgacccctgaacgggcagcactcccttattttccccgcagatatggtgcccatgccagcctccgctataacccccgagaacgccagctctatgcctgggatgatggctaccagattgtctataagctggagatga

SEQ ID NO: 35551 - DNA, 439 bp, Homo sapiens
  misc_feature (1)...(439): n = A,T,C or G
agcggttnnnnnaatcgatgacactactcagtgcggtggaattcggcagctcagaccaccaagcacaagtgggaggcggcccatgtggcggagcagttgagagcctacctggagggcacgagcgtggagtggctccgcagatacctggagaacgggaaggagacgctgcagcgcacggacgcccccaaaacgcatatgactcaccacgctgtctctgaccatgaagccaccctgaggtgctgggccctgagcttctaccctgcggagataacactgacctggcagcgggatggggaggaccagacccaggacacggagctcgtggagaccaggcctgcaggggatggaaccttccacaagtgggcggctgtggtggtgccttctggacaggagcagagatacacctgccatgtgcagcatgagggtttgcccaagcccc

SEQ ID NO: 35552 - DNA, 491 bp, Homo sapiens
  misc_feature (1)...(491): n = A,T,C or G
ccgcccccccccgntnngnattgtagatcactagtccgtgcggnggcattcgcttgtttcatatcgtgccattaacaggccagatatcacagacacggaaatggaaactgttatggacactatagttgacagcctcttctgcttttttgttactctgggtgctgttcctataatcagatgttcaagaggaacagcagcagaaatggtagcagtgaaactagacaagaaacttcgagaaaatctaagagatgcaagaaacagtctttttacaggtgatacacttggagctggccaattcagcttccagaggcccttattagtccttgttgacagaaacatagatttggcaactcctttacatcatacttggacatatcaagcattggtgcacgatgtactggatttccatttaaacagggttaatttggaagaatcttcaggagtggaaaactctccagctggtgctagaccaaagagaaaaaacaagaagt

SEQ ID NO: 35553 - DNA, 473 bp, Homo sapiens
  misc_feature (1)...(473): n = A,T,C or G
tttgaggccgtttgncnattgtagactattatccatgcggtggaattcccgttgtatcctacttattttagaaacagaggtggcctaacttggtggccaaagtaactggtttactttgagtgcaccatcttatggtgccattgatgaggaattaaagtacgtcaaaatttaattggagttggtattacttcgtaaagctagttttcaagaggaagaaaaccacacttactaatgttttctgtatctaatcaaatactcttcatatataattaagcctcatgttatcttttttttaaatcaaccttttgaacttcaactacagtctaaaagtcttgatggtaactatagcgtaattatctttttgtctcactggattttatagttagcggaaaatgcctttacaaaatgtatttaaaatagctgtcatctcatttgtaaattttgtcgtgtattgagatatagtgaaccttatt

SEQ ID NO: 35554 - DNA, 484 bp, Homo sapiens
  misc_feature (1)...(484): n = A,T,C or G
gacccatccnnnttcgaagtccctattcgangtccctgaatccgcgcggggagctggcaactgatggcgtcgctgatagcctctagctgaccggaacacattacaacttgcaccatttccattacctgaacattgggccctcagcagaggacttatatgactgcagggtggagcactggagcttggaccatccgctcctcaagcactgggaggcccacgagccaatccagatgcctgagacaacggacactgtgctctgtgccctgggcctggtgctgggcctagtcgggatcatcgtgggcaccgtcctcatcataaagtctctgcgttctggccatgacccccgggcccaggggaccctgtgaaatactgtaaaggtgacaaaatatctgaacagaagaggacttaggagagatctgaactccagctgccctacaaactccatctcagcttttcttctcacttcatgtgaaaactactccag

SEQ ID NO: 35555 - DNA, 456 bp, Homo sapiens
  misc_feature (1)...(456): n = A,T,C or G
cttggacatcgatgaccattagcccagngcggtggaattcgagaagcaggagctgtcgggaagatcagaagccagtcatggatgaccagcgcgaccttatctccaacaatgagcaactgcccatgctgggccggcgccctggggccccggagagcaagtgcagccgcggagccctgtacacaggcttttccatcctggtgactctgctcctcgctggccaggccaccaccgcctacttcctgtaccagcagcagggccggctggacaaactgacagtcacctcccagaacctgcagctggagaacctgcgcatgaagcttcccaagcctcccaagcctgtgagcaagatgcgcatggccaccccgctgctgatgcaggcgctgcccatgggagccctgccccaggggcccatgcagaatgccaccaagtatggcaacatgacagaggaccatgtga

SEQ ID NO: 35556 - DNA, 438 bp, Homo sapiens
  misc_feature (1)...(438): n = A,T,C or G
ggggggnnnnnaatcgatatccactactcagtgtggtggaattccttgattagaggtttgggcatataaccagattaaagtgaaggaactttctgttgtttttgtagcaccgctcagctgtcttgtaaaacagtgaacacacgctttctggttctagtaatcctgggtgtttatcacgttcagagaaactcaagctattgcatgattagccccctatctggcaaggaaaccccatacagaagaaacaacaaacctgcgcctgcaccgcctctgcgtgctgggtagtctgtgcttgtaatccagcatgtttcacagagtaagcctgttgtgactttgcttttggggtctatgtcattgggttctgatgcttgtacaaacacgcacacacaaatggataaaacagcacctctggctgttacattaccataaaccatatca

SEQ ID NO: 35557 - DNA, 505 bp, Homo sapiens
  misc_feature (1)...(505): n = A,T,C or G
tggcnnnnnnnnnnttcgtgtagcaccctagtccgtgtggtggaattcgagcggagcagaggacgtctacaccagccttgggcagctgcgggccccttagcctgccctgcttccaagcgacggccatcccagtaggggactttcccacactgtgcctttacgatcagcgtgacagagtagaagctggagtgcctcaccacacggcccggaaacagcgggaagtaactggaaagagctttatgacagcttaaatgccgagtgggcgaatgccagaccaatgatacccagagctacctgccgccaacttgttgagatgtgtgtttgactgtgagagagtgtgtgtttgtgtgtgtgttttgccatgaactgtggccccagtgtatagtgtttcagtgggggagaagctgaaagaccaagactcttcccaagttagcttgtctcctctcctgtcaccctaaaagccactgagttgtgtanggatgaagactattgaagactccattgc

SEQ ID NO: 35558 - DNA, 456 bp, Homo sapiens
gtgaacaccaacttttatttggaataataattttcctcctaaacaaaaacacattgagtttaagtctctgactcttgcctttccacctgctttgtcctgggcccgctttgcctgcttgaaggaacagtgctgttctggagctgctgttccaacagacagggcctagctttcatttgacacacagactacagccagaagcccatggagcagggatgtcacgtcttgaaaagcctattagatgttttacaaatttaattttgcagattattttagtctgtcatccagaaaatgtgtcagcatgcatagtgctaagaaagcaagccaatttggaaacttaggttagtgacaaaattggccagagagtgggggtgatgatgaccaagaattacaagtagaatggcagctggaatttaaggagggacaagaatcaatggataagcgtgggtggaggaagat

SEQ ID NO: 35559 - DNA, 452 bp, Homo sapiens
gccgcacgagatccagtcttgcatgggacgcctggagacggcagacaatcagtctgtgcacatagtagaaaacgaaatccatgcaagcatagaccacatattcatccgtctagaacgtctggagattttgtccaccccggagccccctaacaaaaggcaaaatgcctaacttcggattgaccagttaaaggatgatgtccatcacctgcagactgcgctcagaaacttccatcatcttcgccatgcaagggagcagcaggagatacagcgagaagagcttttgtatcgaaccttcaccactaacgactctgacaccaccataccaatggacgaatcactggagattaactcctccctccacaaagatcacaacggcatggatgacctcattttagatgggcacaatattttatatggactgacgacccagagactgaccttgaaggggactc

SEQ ID NO: 35560 - DNA, 495 bp, Homo sapiens
  misc_feature (1)...(495): n = A,T,C or G
agggnctnntttgttagagtaccatgtgcggnggcattccccttcacctcatccagcactgtatctgaagcttcactattcttccttcagttttggatattttgtgatacaacattatccccaacttaggacaatgtgagctgactctcaggagggtgcctggagatcacctcttccttcctaacataccctagaacaaggtctggtccccttcattattcccattttaccttactcctaagtgtatcactcctcatgaattccaggaaatatggaggaaaacacatttcactgtacatgactttcaataatttctcctttatatttattgtaacgtgatattttagtgctgacatatatatgtatatgtatgcccatttatataaaagactagtttttaaagaaattttaggttcacagcaaaatggggcagaaggtacagagatttcccatatatcccctaccctcacatatacacagcctcccccatcatcg

SEQ ID NO: 35561 - DNA, 467 bp, Homo sapiens
  misc_feature (1)...(467): n = A,T,C or G
natcgagatccctagcgagngtcgtggaattcctcacgttgcggtcttactcacgttgcggccttcctcgcgtcacagccgggatgaagccgatcctactgcagggccatgagcggtccattacgcagattaagtataaccgcgaaggagacctcctctttactgtggccaaggaccctatcgtcaatgtatggtactctgtgaatggtgagaggctgggcacctacatgggccataccggagctgtgtggtgtgtggacgctgactgggacaccaagcatgtcctcactggctcagctgacaacagctgtcgtctctgggactgtgaaacaggaaagcagctggcccttctcaagaccaattcggctgtccggacctgcggttttgactttgggggcaacatcatcatgttctccacggacaagcagatgggctaccagtgctttgtgagcttttttgacctgcgg

SEQ ID NO: 35562 - DNA, 493 bp, Homo sapiens
  misc_feature (1)...(493): n = A,T,C or G
agcgnnttnnnnctcgtgatcctcgttcgtgtggtggaattcgagactccctcgaggaaggatttgtagggtgaaggactttgggagcatcgagaattctttctgcccaactaagcgaattatagcgaactgcggaaaggtgaggctccgggagaggaagcgcccatctctggactcccatccatccctatcctgtcctttcccccttcccagacaacaggagaacccgtgaattgtgtaaataaaattctgctttttctattctgaaaaaggacttacctaggaccatggcaaataatctctaacaatttacctggaaattaaggaattgggggtattttgttctggcaacaggaaatttacccttctgctgaaatccaagatattcagtgctctgcagaagcctctccccctcacagatctctgcggctgctgattggtaaaggaagcttgaggagggaactgcagccctaggaatctgggtgaatggggt

SEQ ID NO: 35563 - DNA, 468 bp, Homo sapiens
  misc_feature (1)...(468): n = A,T,C or G
natcgagacccttgtgagaacctaggacangccgcggaattcgctgccaccaacatggagactttgtaccgtgtcccgttcttagtgctctattgtcccaacctgaagctgaagaagccgtcctggttgcacatgccgtccgccatgactgcgtatgctctggtggtggtgtcttacttactcatcaccggaggaatactgtatgatgttatagtcgaacctccaagggtcggctctatgactgatgaacatgggcatcacacgccattagctttcttgacctacatagtagatggacaatatattatggaaggacttgcatccagcttcctatttacaatgggaggcttaggtttcataatcctggaccgatcgaacgccccaaatatcccagaactcaatagattccttcttctgttcattggattcagctgcgtcctattgagttttttcatggctaaactattc

SEQ ID NO: 35564 - DNA, 384 bp, Homo sapiens
ggtgtggccagtcccagctgccgtcttaaagcagatgtgcgcaacagtgtacaggcacacctgccatagcaaattcctaggatacctcagtcctccatgttggtatgcttttcttttcaacaatgtggaaaatgcagtttaccaagaagcttttttggttttccttttaaggtattacttcaaaaaagcaagcgatgagtttgcctgtggagcggtgtttgaggagatctgggaggatgagacggtgctcccgatgtatgaaggccggattctgggcaaagtggagcggatcgattgagccctggggtctggctttggtgaactgttggagcccgaagctcttgtgaactgtcttggctgtgagcaactgcgacaaaacatttt

SEQ ID NO: 35565 - DNA, 390 bp, Homo sapiens
  misc_feature (1)...(390): n = A,T,C or G
atggccttgttgtctgaaagcagaaagccatgtagaggatgacagggagggatgctaggccttggacttctgtggtcgattggccctttcaaaggctggctctgagatattacagccaagaacatgtttcctgctgcttggaatcagtatgtctgcctctgtgttagagaaatcctaagacttctttaagaggaaaatgaattggaaccgtagtgggcattagtctataatatgatgctctcctccctgccagaacttcaggacaaatatttgaaatggcctatcttggcctggtgtggtggcttatgcctgtaatcccggcacttcgggaggccaaggctggaggattgcttgagccgagtttagaccagcctatgcaatatggagagn

SEQ ID NO: 35566 - DNA, 439 bp, Homo sapiens
gggtcaccctcctttgcgaaagcctcacattattgagactcactgagatttcccccccagtaagactgggtttgtcctcttcctctctggacggccgtggtccatcatgaggagctccacatcaagccccatgccaaaaccccctccctttgacagagagggaactttattgcacaattgggtgccttttagcttttgtgtgttgaaatgggcgtcttggaagcaagggtcaagggacagcttctaaaggtgagagtctctgacctgaacatctgggcctcgcctgggcccttcttcctgcccaggggtggaaacgcggaggggccagcagcaccccggggtctgcccatgggagtcaaggccccgaggagggggggcctattccatgaggagtgggatctcggccctgtccagagcgagataatgtgttcatctagcc

SEQ ID NO: 35567 - DNA, 461 bp, Homo sapiens
  misc_feature (1)...(461): n = A,T,C or G
atcggttttccatttctgagttgcngtatnntnccnnnnngnngnaangccgcggngggctctactcgatgcctctgcagncnnncccnggaggttactattccagcaggcnccagaaggacccngggggggacttgagggggagctgagccctcagggccgccagcaaggaagaaatttgtgatacccctcgacgaggatgaggtccctcctggagtggccaagcccttattccgatctacacagagccttcccactgtggacacctcggcccaggcggcccctcagacctacgccgaatatgccatctcacagcctctggaaggggctggggccacgtgccccacagggtcagagcccctggcaggagagacgcccaaccaggccctgaaacccggtgcaaaatccaacagcatcattgtgagccctcggcagaggggcaatcccgtactgaagttcgt

SEQ ID NO: 35568 - DNA, 493 bp, Homo sapiens
  misc_feature (1)...(493): n = A,T,C or G
agaggcccccncntncttgcnnccaaacggtacagtanganccccntanntanngncaaggaaccagacattctggatgaagcagacancatgacctacggagcccattttgccttgaagagaaccatggaaatctactctaaagacactcttttaaaccttgctgaaaacgcttcagataaaatcatcnagcccattcagtcccgctgtgcagtcctccggtacacaaagctgaccgacgcccagatcctcaccaggctgatgaatgttatcgagaaagagagggtaccctacactgatgacggcctagaagccatcatcttcacggcccagggagacatgaggcaggcgctgaacaacctgcagtccaccttctcaagatttggcttcattaacagtgagaacgtgttcaaggtctgtgacgagccccacccactgctggtaaaggagatgatccagcactgtgtgaatgccaacattgacgaagcctacn

SEQ ID NO: 35569 - DNA, 482 bp, Homo sapiens
  misc_feature (1)...(482): n = A,T,C or G
ggggaagggggggtnncccccttcgagatcatagtccacgtcggggaattcgaaattccttgagctcataggcattgctcagggtcagatgacagttctgagactcactgagttgctggaacgaggggagaggctgccacggcccgacaaatgtccctgtgaggtctatcatctcatgaagaactgctgggagacagaggcgtcctttcgcccaaccttcgagaacctcatacccattctgaagacagtccatgagaagtaccaaggccaggccccttcagtgttcagcgtgtgctgaggcacaatggcagccctgcctgggaggactggaccaggcagtggctgcagagggagcctcctgctccctgctccaggatgaaaccaagagggggatgtcagcctcacccacaccgtgtgccttactcctgtctagagaccccacctctgtgaacttatttttctttcttggccgtgagcctaan

SEQ ID NO: 35570 - DNA, 488 bp, Homo sapiens
  misc_feature (1)...(488): n = A,T,C or G
agcggctnnnnnattgactgacntacactagtccagngccgtggaattccggctctgtgacaccctttttgtgatcttcagtgctgtttttatggttacacgactaggaatctatccattctggattctgaacacgaccctctttgagagttgggagataatcgggccttatgcttcatggtggctcctcaatggcctgctgctgaccctacagcttctgcatgtcatctggtcctacctaattgcacggattgctttgaaagccttgatcaggggaaagatggagtctcactctgtcgcccacgctggagtgcagtggcacgatctcagctcactgcaacctccacctccggggttcaagagattctcctgcctcagcctcctgagtagctgggattacaggtatcgaaggatgatcgcagtgatgtggagagcagctcaaaggaagaagatgtgaccacctgcacaaaaagtccctgtgacagtag

SEQ ID NO: 35571 - DNA, 476 bp, Homo sapiens
  misc_feature (1)...(476): n = A,T,C or G
gcccctccccccattgagatccatgatagtctaggcaanttcgggcaaggcgcacctgcgagagctgctcaaggagcagaagtacgaccggcagctgtttttgtgttgtgatcatgggcaagaggctttagaatctgctcatgtttgcctaataaatgcaacagccacaggaactgaaattcttaaaaacttggtactaccaggtattggttcgtttacaattattgatggaaatcaggtcagcggagaagatgctggaaacaatttcttccttcaaagaagcagtatcggcaagaaccgagctgaagctgccatggaattcttacaagaattaaatagcgatgtctctggaagttttgtggaagagagtccagaaaaccttctagacaatgatccctcatttttctgtaggtttactgttgtaggtgcaactcagcttcctgaaagcacttcactacgcttagcagatgtcctct

SEQ ID NO: 35572 - DNA, 459 bp, Homo sapiens
  misc_feature (1)...(459): n = A,T,C or G
attgagacctgagaccactgccagngcggnggaaatcgagcgctttctccactgtgcacctgaggcagatcatgcatctttgagtgcagtttggtctgacccctcaagagaaaagcatggtgccggagggctgctatggattgaatggatgccatcactcttttctccacatacagtgcagagagctgtctggagacacaatctgaacagattctcgggcgctccttctctccttccatcactacagtaagtaaacggaccatagaggggaaccaggaatctgagaatcagctgtgctcaatagccaacctccctgtccagatgcagctattttggtatcttctaatcacatgcactctgaatcagggcttttctataagaaatctgtcagaatcaccaaaagtggggatgacccatgcatattgatttgcaaaatcacaaaactaagttgtcagttat

SEQ ID NO: 35573 - DNA, 472 bp, Homo sapiens
  misc_feature (1)...(472): n = A,T,C or G
ntcgacccccctttcgtagaccactagtccgtgtgctggaattcccagaagcagctgcagtgttgctgccaccaccctcctgtctgcctcttcaaagtctcctgtgacattttttctttggtcagaagccaggaactggtgtcattccttaaaagatacgtgccggggccaggtgtggtggctcacgcctgtaatcccagcactttgggaggccgaggcgggcggatcacaaagtcaggacgagaccatcctggctaacacggtgaaaccctgtctctactaaaaatacaaaaaaaaattagctaggcgtagtggttggcacctatagtcccagctactcggaaggctgaagcaggagaatggtatgaatccaggaggtggagcttgcagtgagccgagaccgtgccactgcactccagcctgggcaacacagcgagactccgtctcgaggaaaaaaaaagaaaagacgcgn

SEQ ID NO: 35574 - DNA, 428 bp, Homo sapiens
ctctgctgtaactgcagggtcacaggcatcccgggagaatgggcctccaccctcagccagccctcactgctgacaggcacccctctgtcacctcctgccacctgtcagatacccagcctgcccgccatcagccacccgagtggttccgacctccattcacctcaagccccaacaggcccctgtcattccacttcatggaagagacggagccttctgaaatgagatctaccctgaaaatctcttctccttcccctttctgagaaacgtcatccccaccagttaacgtttcctgtacaccctcaccctctctcgtccatctctgttgcctctgcacatcagcacacactgactccacctgggctggctcctgccgcctcttccctacctcctccactagccgcaggaagggcctccagcacccacaactg

SEQ ID NO: 35575 - DNA, 448 bp, Homo sapiens
  misc_feature (1)...(448): n = A,T,C or G
ggggggncanntttgatagtcgtacactagngcggngcaanttaccatctcacgagcgcatcactgctcaggagattgacagctacttacgccgggagctgatctacaagcggaatgagagaatagggaagcgggtgaaggcccttttggaggagttccctgacaaaggcttcttctttgcctttggagctggtcatttcatgggcaacaacacagtgctggatgttttgcggcgtgaaggctatgaggtagaacacgcccctgctggacgacccatccacaaagggaagagtaaaaagacctccacacggcccactctgtccaccatctttgctccaaaagtccctaccctggaagtaccggcaccagaagccgtatcctcagggcactcaacgctgcctccccttgtgtcccggcctggaagtgccgacacgcccagtgaggccga

SEQ ID NO: 35576 - DNA, 440 bp, Homo sapiens
ggatttgaaaacccagtatcagaatctaccactttgtatgttaattattcatactgcatgactgaggattttggaggcagagagagattcatctgcaatatttggaacaccaatggaggtctacgtcaacacagaatttatacagcagctggtgctagtcagagctaatgacagaatttcagtttaataaaaagacccccaactgagcacaccatcttgaaaaaagtatacttatcaaacagctttcaatcagttcaagagagacaccttaattggggagaggaagaattgcagagtagtttgtaatcatgccaattccagatcaataactgcatgtctgttctttggtagaaatagcttttgctttatattaagtaatcacatatatattctctctatttggataaggaaaccttcgctttatttgacaatgtataatg

SEQ ID NO: 35577 - DNA, 394 bp, Homo sapiens
  misc_feature (1)...(394): n = A,T,C or G
gtatttatttttagaggtacatgttttaagtaaatgtatttaaaacaaattttcatggtctgaattgtatatgtaaatgcatatctgtgtaagtatatgcaagtgtatattcttctactgattcagtcagacacgaaatccaactgaattacccggtagactgaatatctgacgggatttctatatggacatagcacagatgaaccaaaaatgtatttatattcacctgagttttaatgtttttaaacaaagttttctcctgcagtgcttttctatatgaaatagttgagtcaagcttgggcttttttcttcgttgttcccaagtcatgtaatgtatagtgaatttatccaaaacgccattgtaacgttntttactagagagtttttgcacatn

SEQ ID NO: 35578 - DNA, 466 bp, Homo sapiens
  misc_feature (1)...(466): n = A,T,C or G
catcgaagtccctagaccaccgtggnggaattcgcgatgtggagttagtgaacttgaaaaagaaggtctgcggtgccgctcagactctgaggatgagtgcagcacgcaggaggccgacggccagaagatctcctggcaggcagccatcttcaaactgggagacgactgccggcaggacatgctggccctgcagatcatcgacctcttcaagaacatcttccagctggtcggcctggacctctttgtttttccctaccgcgtggtggccactgcccctgggtgcggggtgatcgagtgcatccccgactgcacctcccgggaccagctgggccgccagacagacttcggcatgtacgactacttcacacgccagtacggggatgagtccactctggccttccagcaggcccgctacaacttcatccgaagcatggccgcctacagcctcctgctgttcctgctgcag

SEQ ID NO: 35579 - DNA, 488 bp, Homo sapiens
  misc_feature (1)...(488): n = A,T,C or G
ggggaagggaggcgggccngnttagaaaccactgagaccttagtccagngcggtggaattcagctggtgcacaggaaggatgaggaagaccaggctctgggggctgctgtggatgctctttgtctcagaactccgagctgcaactaaattaactgaggaaaagtatgaactgaaagaggggcagaccctggatgtgaaatgtgactacacgctagagaagtttgccagcagccagaaagcttggcagataataagggacggagagatgcccaagaccctggcatgcacagagaggccttcaaagaattcccatccagtccaagtggggaggatcatactagaagactaccatgatcatggtttactgcgcgtccgaatggtcaaccttcaagtggaagattctggactgtatcagtgtgtgatctaccagcctcccaaggagcctcacatgctgttcgatcgcatccgcttggtggtgaccaagggtn

SEQ ID NO: 35580 - DNA, 438 bp, Homo sapiens
  misc_feature (1)...(438): n = A,T,C or G
catggaggtgggggtgggatcaatcttaggaaaagcaaaaaagggtcccagatcccttggccctttcctccgaggacttctatcctccccaggcctttgtttcttcggctaaaggtacagttcctttcaagaggtaacagcactgggatccaagcagggggatgaaaaactcagcagagaaattcgagaccattttgcaagactgtgcccttctcctcaggaccccctggctcagttcttgaaaaacggtgtcatatttagtcagaggccccacccccaggaagcatggatggggatgaaggcacaggcgtctccaacctcagaggccctttgtggggtcaggacacagagtgggagggagactgatgcangcctaccagtccctggctttttgtctggggctggaataaagaggtgccttcagctggtgggccgaaa

SEQ ID NO: 35581 - DNA, 443 bp, Homo sapiens
  misc_feature (1)...(443): n = A,T,C or G
aggcnnnnnnnntttgctcgtcgtcactagtccgtgcggtggaattcctgcggactactgcagtggagcttgactcttaatgggtcccaaagcaaaaaagtctggcagtaagaaaaagaaagtcaccaaagctgaacgattgaagctgctacaagaggaggaggagagacgactgaaagaggaagaggaagcccgtttgaaatatgagaaagaagaaatggaaaggcttgaaatacagcgaattgagaaagaaaaatggcatcgacttgaagcaaaagatctagaaaggagaaatgaagaacttgaagaactttatttattagagaggtgttttcctgaagcagagaaattgaaacaggaaactaaattgctttctcagtggaagcactacattcaatgtgatgggagtcctgatccttcagtagcccaagaaatgaacacgt

SEQ ID NO: 35582 - DNA, 386 bp, Homo sapiens
  misc_feature (1)...(386): n = A,T,C or G
ccatgtcctgctggttcccgaggtgctcctggtcctcaaggcccacgtggtgacaaaggtgaaacaggtgaacgtggagctgctggcatcaaaggacatcgaggattccctggtaatccaggtgccccaggttctccaggccctgctggtcagcagggtgcaatcggcagtccaggacctgcaggccccagaggacctgttggacccagtggacctcctggcaaagatggaaccagtggacatccaggtcccattggaccaccatggcctcgaggtaacagaggtgaaagaggatctgagggctccccaggccacccagggcaaccaggccctcctggacctcctggtgcccctggtccttgctgtggtggtgttggagccgctgn

SEQ ID NO: 35583 - DNA, 387 bp, Homo sapiens
gaactccttcctcaggggtagcaagtgaccccaggcggatgtggtttcagagctcaaggaattatctagtgccctgaccacaccagagatgcagaaagaaatccaggagttaaagaaggaatgcgctggctacagagagagattgaagaacattaaagcagctaccaatcatgtgactccagaagagaaagagcaggtgtacagagagaggcagaagtactgtaaggagtggaggaagaggaagaggatggctacagagctgtctgatgcaatacttgaaggataccccaagagcaagaagcagttctttgaggaagttgggatagagacggatgaagattacaacgtcacactcccagacccctgaggggcccacggtcaggactg

SEQ ID NO: 35584 - DNA, 479 bp, Homo sapiens
  misc_feature (1)...(479): n = A,T,C or G
aggggaggggnnccccccnttcgagatcttagaccacgtggtggaattcgggaggcggagcttgcagtgagccgagatcgtgccactgcactctagcctgggtgacagagcgagactccgtccccaaaaaaaaaattctgagaatatggtgtgttccagcctcttcaaagctctgctcttctgcacacgttttttgaaggccttaaaaaggccaccagtgtgaccagggagcaccctctgcctccctccctgcactgggaccataaacataaacagctctaccagcaaagtgacccatcccgcgggggaggcctgcgcacgcccctcaccagggctgtcatcagaatccagtcttaggacagaggaaggatgtttgccttcaggaccagcaagtcacaggtgtcctggatgttacccaagctctaaaatcaaataaaacccatcagtatttaatggtgtgtgtgtgtgtgtgtgtgtgt

SEQ ID NO: 35585 - DNA, 486 bp, Homo sapiens
  misc_feature (1)...(486): n = A,T,C or G
cgcgggctnnnnatcgatgagcctactctagtgtcgnggaattccagtagctgatgtcagacaagcttgtcctatgtcctatttgagtggcagcagcgccagcccagcaagaaggctgggggttgtcaaggttgtccccagaccttgcttgcagtggttggagaacccagggggctgccttgggccctctggccagagggaagcgggcagctctagccctggagattgtggtcacattggggcttgtttaggattggagggccaggtcacctccccagccaccctcccttctctcctctggggtccccactttagggcgactttgcccgaggcccacgcatccatccactcctttagtgccttgaatctcattcacaagcagccccctgccttcccctccccttctcactctgttgatgtaatcctcccacccccagtgtgcatcctaagacaggcatcaaaagaggccctaactttacttcccan

SEQ ID NO: 35586 - DNA, 491 bp, Homo sapiens
  misc_feature (1)...(491): n = A,T,C or G
tgaccgtgccaggnnnnacnnnnttcgaagaccactagtcgaatgtgcctgaattccatctttgtctgtttctatgaagataaaataattgggggccatctagaaatagaaaggcagtgggaagacagattctacggcactgctttcatttaattgggctttaggcactccattcgaatgcagaacctcacctctagttgagaccaagaattggcaaatttgcatgagctcctggaaagagttgctgactttgtatctaagacctgccagggaataccaagagttgtttctacagacttttttttttttttggtggggaaaaaaatccggggccccccgggagggagggaaaaaaaattttttttttttccgcaaattaaggggggggagccccccccatcccttgggtttttaagggtcaaaaaccaggggccaaggaaaattcccaagggagaattttggggaagctttttggcccccctgggggtccc

SEQ ID NO: 35587 - DNA, 473 bp, Homo sapiens
  misc_feature (1)...(473): n = A,T,C or G
aatcgtagaccctagnanagngtttcgagntctcctagtccagagcggaggaattccgcagccatggcctggaccgctctccttctgagcctccttgctcactttacagggtctgtggcctcctacgaggtgactcagtcactctcagtgtcagtggccctgggacagacggccaggattacctgtgggggagacaacattggaagtaaaaatgtacactggtaccaacagaagccaggccaggcccctgtattggtcatctatagggataccaaccggccccctgggatccctgagcgattctctggctccaactcggggaacacggccaccctgaccatcagcagagcccaagccggggatgaggctgactatttctgtcaggtgtgggacagtagcgcgtatgtggttttcggcggagggacccagctgaccgtcctcggtcagcccaaggctgccccctcggtcactct

SEQ ID NO: 35588 - DNA, 465 bp, Homo sapiens
  misc_feature (1)...(465): n = A,T,C or G
cattgatgatcattcgtccagtgcggtggaattcggcggtaccaacccctgccgcaagactttcctgggccggctcgcggagagcgtagcgcggccttggtggcggaatggcgttgagtgacggcccggccccgccatctggttaaagggactcgttcaacacggaagtgtcccggggctgcattgtgctacagctagaatgaagcacatcaacctatcatttgcagcgtgtggatttctgggcatttaccacttgggggcagcatctgcactttgcagacatggcaaaaaacttgtgaaggatgtcaaagccttcgctggggcgtctgcgggatcgttggttgcttctgttctgctaacagcaccagaaaaaatagaggaatgtaaccaatttacctacaagtttgccgaagaaatcagaaggcagtctttcggggcagtaacgcccggttatgacttcatggn

SEQ ID NO: 35589 - DNA, 474 bp, Homo sapiens
  misc_feature (1)...(474): n = A,T,C or G
gggcggnnnncccccctttgatgtcgatccctagtgcgtgtggaggaattcctgtagagtgcttttttgcattcagaaggtggcagtgtctaccctttaatcaaagtctctacattctggttttaatagagttaggatgtggtacataattgcacctcaatgaggcataactttgcaaatattagactatgccatttcatgagttatagattgttataatgatcttgtatttttatgttcatttattgaagttctagttatttctggagttgctgtggatctacagatacgtgatattttggtataactagaatcttgatttctttcataaagttctgccatgttctatttctttccttaatgtttttttcttccctactgttttatcctccctttgctttggaaggatattgctgcatatcgagctaaaggaaagcctgatgcagcaaaaaagggagttgtcaaggctgaaaa

SEQ ID NO: 35590 - DNA, 387 bp, Homo sapiens
gccttgcgaagcctcctcagctcggggggccggggacccagtgagccgagaggccctctgggctccacttatgcatatgcaccaaaaaaaaaaaaaaaaaaaaaaaaaaggggttttttaaaacaaaacccctttaaaaaaaaaaaggacccctggggggaatcccgtttttggggacccccgaagggaaaaagccaagtttaaggaatatttaaatggggcctaaccttggggaaaggtggaaaaagggcccaaaaagacccaaaaagcccaaaaccaaggggccccccccttttggggttcacccccccaaaagaaaccgcccccatttagggggcccgggggcccaactttaaaaaagggaaaaaacaatttggggttttgtgg

SEQ ID NO: 35591 - DNA, 480 bp, Homo sapiens
  misc_feature (1)...(480): n = A,T,C or G
nttcgagaccactgtctagngtcgcggaatccggcacactggccttcaaaacgtacatatcaccagtatctatcatgataaccctcactacagcttctagctaagacctttgctgctgtcctctcaaactatatttataaaaatttgctagggcccaattcatacttgcagaataattcatcaaattttatttttaagcgaaaagcaacctttcaggcatttcagcatgcatacattgacaatctagggtatatatgtatgtatgtcccttattgtatgtctatatatgtatgtggggaggacaggagtgaatgctcacacacttttcttgcgtactcaactaaattggagaatgtttctgaagaaaattggatgaaattagctgctgagattgagtttctgccttaaaatctgaaacaaaaaaagggacaaattgctggtagatctactgactgtagccatcaccagaacacttagttt

SEQ ID NO: 35592 - DNA, 492 bp, Homo sapiens
  misc_feature (1)...(492): n = A,T,C or G
natcgtgaacactcctcagngtcgnggaattcattctaggctgtagtgccgatctatgttgagcatctatgccgatctatgccgatctaagttgagcatcagtatggtgacctctgtggagtggggcaccaccaggttgcctaaagaggggtaaactggcctaagttggaaacagcacaagtcaaaactcctatgctgataagtagtgggatcaagcctgtgaatagccactggattccagctgggcaacatagatagaccctgtctcttataaattaaaaacaaaaacaaacaaaaaaaaagccaacctgataatactggtttactctgagaaagaaacaggtggattgctgaggtgtatgattgagagagagactttacattttattttgtacccatgcaaatgtattacctattgaaaaaacaataaaattttgatttcacaagcaggttgaagggagaaggtcctataaaataacactttcttggttg

SEQ ID NO: 35593 - DNA, 460 bp, Homo sapiens
  misc_feature (1)...(460): n = A,T,C or G
caggtcaggagtccctcccgtccacctcctctgtaacagctggggttccaggcatggtttaggccctgttccagcaataagaaccaatctgctgtacaatctgaggacttggctgtgttatttacaaaatgatgctgtggttctgagattatttgggacatttttggctctcctttagtggacacctagagccacagattcccttctttactaaacaaatcccatggattctgatttctgggtcttaggattttaaaagtgaagggatatttttcttatatttgtgagttcagttccgatggtgcccgtggtcaaaagcgaaaaacatggacaattcctattcattcttagcactttgacatgtcttggggaaaagcttacattttaatttaaaagaaagatcaattatatccatgcttaacaggatcagcaggagctttataaatgactttacagagan

SEQ ID NO: 35594 - DNA, 480 bp, Homo sapiens
  misc_feature (1)...(480): n = A,T,C or G
atggagggnnnnncncccaatgatnaccatagatccacgtcgcggaanncgagaagaagaagttatgacatatgtaatacacatctgtgtacacagaaaccggcacctgccagacagagctggttctaagatttaatacagagctttttttcctctttgaaatattttactttaataccagtgccttttcttgttgaacttcttggaaaagccaccaattctagatcttgatttgaattaatacacacaatatctgagacacttacacttttcaaaagatttgtgtatgcattgcctaattagagtagggggagaagggcaactattattatccctattttacaaaactgaggcttagtgaggttcagccacatgcctagacttatatactagttagtggtgcagccagggagaggactcagatttcctggaggcaaagtctatctctgaaactccatgaagacttttgcagccagctcc

SEQ ID NO: 35595 - DNA, 479 bp, Homo sapiens
  misc_feature (1)...(479): n = A,T,C or G
ccccccccccccccnatagaaacccctgatgacataggccagngcggaggaattcaaattaagtacagggccttgaagtggcctgggcagggaggagccctaaagctacctgggcttctaggaaatcgcctttcttgagtgtgcagacaggaggacgacagaactacccagtctttgtggtcctggtggtctacgctgtcccttagttaggactgaatgtgttcatatgagtcttatcttagtccaaggctttacaattgggagcaaagacaagtttgttttgtacaagagtgtaagtacttagagttgggcaggagtggcataatgaggcagggagtagaaaatctggtgttaaaacgtacaagtataggaaggagggaagcccctggaaatgttctctcttgtagaatgtaaaaagttcctcttcaaagtttccccttcccttcttgttaaagaataaatcataagtgttaaaaata

SEQ ID NO: 35596 - DNA, 467 bp, Homo sapiens
  misc_feature (1)...(467): n = A,T,C or G
cggagtcgagaccatatccgngctgagaaccctagattaaatgaagtaaactaaagattacaccttttctgctggcactaagcgaaaagcaaaaccagtggctgtctattatctcctgtgttttagacagtcaagtgttgagcacttgctcttattcctttattctctaggggaagcaagcacttatttggctacttggtgtccatggggaaagaattcctaatgctccttatgtgttagaggactttgttgagaatgtgaagtcggaaacatttccagctgttaagatggagctgctcactgctttgctgcgccttttcctctcccgacctgctgagtgccaggacatgctaggacgtttgttgtattactgcataggtgggtttttcagaaggaaatagtatttgccatgacccatagtaaaaattcttaatagctttcattgtttggtgagtcacgtctgggac

SEQ ID NO: 35597 - DNA, 504 bp, Homo sapiens
  misc_feature (1)...(504): n = A,T,C or G
aggccnnnnnnnnaatcgtgatcctacttagtgtggtggaattcctgacttacagcagtcagactctgacaggatcatggctatgatggaggtccaggggggacccagcctgggacagacctgcgtgctgatcgtgatcttcacagtgctcctgcagtctctctgtgtggctgtaacttacgtgtactttaccaacgagctgaagcagatgcaggacaagtactccaaaagtggcattgcttgtttcttaaaagaagatgacagttattgggaccccaatgacgaagagagtatgaacagcccctgctggcaagtcaagtggcaactccgtcagctcgttagaaagatgattttgagaacctctgaggaaaccatttctacagttcaagaaaagcaacaaaatatttctcccctagtgagagaaagaggtcctcagagagtagcagctcacataactgggaccagaggaagaagcaacacattgtcttctccaaactccaagaa

SEQ ID NO: 35598 - DNA, 435 bp, Homo sapiens
  misc_feature (1)...(435): n = A,T,C or G
gcgcttcctccttccttgagcagaaatgtgtgtctcgcctctcttcagattctcgcttacaaggatgacttcatgtcagaaagggccgatcgggaacgggctcaaagtaggattcaagaactggaggaaaaggtcgcctctttgctgcaccaggtgtcctggagacaggattctcgagagccagacgccggccggattcacgctgggagcaaaactgccaagtatttggccgccgacgcattaaagcttatggtgcctggtggctggaggcctgggactgggtcccagcagccagaaccccctgcagagggcgggcatcctgncgcggtccagagaggccagggggaccttcagtgccctcactgcctgcagtgcttcagtgacgagcaaggggaagagctcctcangcatgtggccgagtgctgccagtgaccg

SEQ ID NO: 35599 - DNA, 478 bp, Homo sapiens
  misc_feature (1)...(478): n = A,T,C or G
agggattgagaccatannncgngtagtagatcactantccatgtggtggaattccacggaggcggctcacaggaagtaaaagagcacagctttttcaaaggtgttgactggcagcatgtctacttacaaaagtacccaccacccttgattcctccccggggagaagtcaatgctgctgatgcctttgatattggctcatttgatgaagaggataccaaagggattaagctacttgattgcgaccaagaactctacaagaacttccctttggtcatctctgaacgctggcagcaagaagtaacggaaacagtttatgaagcagtaaatgcagacacagataaaatcgaggccaggaagagagctaaaaataagcaacttggccacgaagaagattacgctctggggaaggactgtattatgcacgggtacatgctgaaactgggaaacccatttctgactcagtggcagcgtcgctatt

SEQ ID NO: 35600 - DNA, 474 bp, Homo sapiens
  misc_feature (1)...(474): n = A,T,C or G
ngggggtcgaagaccctagtccagngttgtggaactccgtgggtggagcacgaggggccggagtattgggaccgggagacacagaagtactagcgcctggcacaggctgaccgagtgagcctgcggaacctgcgcggctactacaaccagagcgaggccgcgtctcacaccctccagaggatgtacggctgcgacctggggcccgacgggcgcctcctccgcgggtatgaccagtccgcctacgacggcaaggattacatcgccctgaacgaagacctgcgctcctggaccgctgcggacacggcggctcacatcacccagcgcaagtgggaggcggcccgtgaggcggagcagcggacagcctacctggagggcacgtgcggggagtggctccgcacatacctggagaacgggaaggagacgctgcagcgcgcggaacacccaaagacacacgtgacccaccatgccgtctct

SEQ ID NO: 35601 - DNA, 461 bp, Homo sapiens
  misc_feature (1)...(461): n = A,T,C or G
natcgatgaccatcagtccagngcggcggaattcgacacagtttggctcatgcctacccacctggacctgggctttatggagatattcactttgatgatgatgaaaaatggacagaagatgcatcaggcaccaatttattcctcgttgctgctcatgaacttggccactccctggggctctttcactcagccaacactgaagctttgatgtacccactctacaactcattcacagagctcgcccagttccgcctttcgcaagatgatgtgaatggcattcagtctctctacggacctccccctgcctctactgaggaacccctggtgcccacaaaatctgttccttcgggatctgagatgccagccaagtgtgatcctgctttgtccttcgatgccatcagcactctgaggggagaatatctgttctttaaagacagatatttttggcgaagatcccactg

SEQ ID NO: 35602 - DNA, 475 bp, Homo sapiens
  misc_feature (1)...(475): n = A,T,C or G
agacgtccnnnntttgannccctgatgatcttagtccagtgcggtggaattcgagctggatgcaccattggctcctgtttgaaatgagcaggcactccttggagcaaaatcccactgacgctccaccgaaagagtcactggaactggaggacccgtcttctgggctgggtgtgaccaagcaggatctgggcccagtccccatgtgagagcagcagaggcggtcttcaacatcctgccagccccacacagctacagctttcttgctcccttcagcccccagcccctcccccatctcccaccctgtacctcatcccatgagaccctggtgcctggctctttcgtcacccttggacaagacaaaccaagtcggaacagcagataacaatgcagcaaggccctgctgcccaatctccatctgtcaacaggggcgtgaggtcccaggaagtggccaaaagctagacagatccccgttcct

SEQ ID NO: 35603 - DNA, 392 bp, Homo sapiens
gaaggatctttactgctttgtgcttggcatgtcattattttccatttgacattagggcctttccaaaatgaatgtgaggaattgctttcacttcaagactttccttcttttcactaaaactctagaaggtgttacaagggggagggaaggggggcaaagtccttgaacattttctttggctcgtgccatgttatgatcatataccttttaaataaggggaaatagtatctttaaagttaatgtctagccaagagtttagtaaacgaagaattaaactgcactgttgatcggtgctttgtgtaaatacatctttaacatttgggtggagaggggccttaagaaggacagttcattgtaggaaagcaattctgtacatgagtttaagcattctt

SEQ ID NO: 35604 - DNA, 441 bp, Homo sapiens
  misc_feature (1)...(441): n = A,T,C or G
ggggtgnnnnnnattgatcgcagtcactagtccgtgcggtggaattctgccttctgaaaggtggaatcctactcagaatgtgaagactatcctattaagtgtaatctcactgcttaatgagcccaacaccttgtccccagccaatgtcgatgcttcagttatgttcaggaaatggagagacagtaaaggaaaagacaaagaatatgctgaaattattaggaaacaagtttcagccactaaggccgaagcataaaaggatggagtgaaggtccccacaaccctggcggaatactgcatcaaaactaaagtgccttccaatgacaacagctcagatttgctttacgacgacttgtatgatgacgacattgatgatgaagatgaggaggaggaagatgccgactgttatgatgatgatgattctgggaatgaggagtcgtgacg

SEQ ID NO: 35605 - DNA, 496 bp, Homo sapiens
  misc_feature (1)...(496): n = A,T,C or G
agggnnntnnntcggctgagtacactatgacnggacttcgcactcgggccggcggacagtgagggcgcgacaacaagggaggtgtcacagttttccatttagatcaacaacttcaagttcttaccatggaaaattccgagaagactgaagtggttctccttgcttgtggttcattcaatcccatcaccaacatgcacctcaggttgtttgagctggccacggactacatgaatggaacaggaaggtacacagttgtcaaaggcatcatctctcctgttggtgatgcctacaagaagaaaggactcattcctgcctatcaccgggtcatcatggcagaacttgctaccaagaattctaaatgggtggaagttgatacatgggaaagtcttcagaaggagtggaaagagactctgaaggtgctaagacaccatcaagagaaattggaggctagtgactgtgatcaccagcagaactcacctactctagaaaggcctgg

SEQ ID NO: 35606 - DNA, 486 bp, Homo sapiens
  misc_feature (1)...(486): n = A,T,C or G
ggggtcttnnnactgatatcctacttcgtgtcgtggaattcgagctgctggcaagggctacctctggaaagctgcaggcatgaacatggaggaagaggaggaactgcagcagaatctgtggggactcaagatcaacatggaagaagagagtgaaagtgaaagtgagcaaagtatggattctgaggagccggacagccggggaggctcccctcagatggatgacatcaaagtgttccagaatgaagttttaggaacactacagcggggcaaagaggagaacatttcttgtgacaatctcgtcctggaaatcaactctctcaagtatgcctataacataagtctaaaggaggtgatgcaggtactgagccacgtggtcctggagttccccctgcaacagatggattccccgcttgactcaagccgctactgtgccctgctgcttcctctgctaaaggcctggagccctgtttttaggaactacataan

SEQ ID NO: 35607 - DNA, 456 bp, Homo sapiens
  misc_feature (1)...(456): n = A,T,C or G
aatggagcctgagggcactgcggaggacttcgnacagntgngctgttaactaaaaatgctgagacccctttttatagaaaaacaaattgacattatgtcttcttaattcaacccataatcattaagtacttaacaaagaatattttacaagtgatagtatttcaacaatgtgtaattaatatttttgatacagtgatttcatattggaatcattatttgtgcaaagggacagacagatcacttagattgctatactagtggacataggctaaatgtttgcacattcacattcttatcacgtgtagaatacttcacaaaatagtcaacatctaaggccctaatttatgttttgaaagatcatgtgttcccaaagtattccctattgttggctccacagccttaaagtgctatagatttaaattcattgaataagtttaattttttaatttagactgg

SEQ ID NO: 35608 - DNA, 441 bp, Homo sapiens
agggtcaagagtctagtctagaaaagagatgcttctaagacagaaggagagagtaggtgaaggttcagagacatttagagaggaaaggagggaaattgaagaagtttatgaaaattttaatcctggttcttggcagtgtaataggggatcccagacagttcttaagaattgccaggcagtgcaactgaggttaagtagcattatctatagtgaagttatttaactcactctgctgactttcttcaaaagtccttgggatctggaagcataagtaaagaatttgactggtgtggagattgacaggtgtggaaatttggaaggaggttcaacacagccatttaatgtgcttaaggagagggtatttagctgttagatgtgggggcttcagtttagttgggaagcagataaagccagaaggatgctaatggagtgggaaagcag

SEQ ID NO: 35609 - DNA, 458 bp, Homo sapiens
  misc_feature (1)...(458): n = A,T,C or G
taaatgaagatccagaaactgctttctgtactcttgcaaacagggaagttttcaatactgatgagtgttcaatccaacattgtttatatcagttcacccgtaatgagaaacttcgagatgcgaataaactgctttgtgaagtatgcacacggagacagtgtaatggaccaaaggcaaatataaaaggtgaaaggaagcatgtttacaccaatgccaaaaagcagatgctaatttctcttgctcctcctgttcttactcttcatttaaagagatttcagcaggctggttttaacctacgcaaagttaacaaacacataaagtttccggaaatcttagatttggctcctttttgcacccttaaatgtaagaatgttgcagaagaaaatacaagggtactctattccttatatggagttgttgaacacagtggtactatgaggtcggngcattacactgcc

SEQ ID NO: 35610 - DNA, 486 bp, Homo sapiens
  misc_feature (1)...(486): n = A,T,C or G
agcggnctnnnntttgatctgcgtccctagtgccgtgtggtggaattcgctatcccaatcgctttaagctctggttcactctggatcatcccccaaaagattgggcctacagcaagggctttgtgactgccgacatgatccgggaacacctgcccgctccaggggatgatgtgctggtactgctttgtgggccacccccaatggtgcagctggcctgccatcccaacttggacaaactgggctactcacaaaagatgcgattcacctactgagcatcctccagcttccctggtgctgttcgctgcagttgttccccatcagtactcaagcactataagccttagattcctttcctcagagtttcaggttttttcagttacatctagagctgaaatctggatagtacctgcaggaacaatattcctgtagccatggaagagggccaaggctcagtcactccttggatggcctcctaaatctccccgt

SEQ ID NO: 35611 - DNA, 447 bp, Homo sapiens
  misc_feature (1)...(447): n = A,T,C or G
actgagatcgtcggcaatgcggnggaacctagctcttctttctgagatggcagttacactttttcacttaagtgctttagtttagactaactttacaacttctataacttttggaaccaagtttagtatagtctgattacattccattcacctaactttagacattcgtttagacaccataactggagtgattgtgcttctagatgtggcaaatccagtgttaacacatatttctggctgagattttggaactagctagtaactggcttgtgttctttaagcatactaacatcactaaatcttaggatttaggattgctgtaaagatgtaagttgtgtatgtttggcaggtcacattgaatggcagtgataatgattaatcaaagaacaaatgtcatccttgatcttgcctaatgtagtttatgtgccaaactttccagggttttgt

SEQ ID NO: 35612 - DNA, 486 bp, Homo sapiens
  misc_feature (1)...(486): n = A,T,C or G
ggggtnctnnnnactcgatgatcctactctagtgtcgtggaattcagaattttttcctgatcagggctccagtggtccagaatcttttactgtctaccactacaatggattgaagcagtcaaattataatgaaaaggtcatgtacgtagaagggactgcagttgtgatgggttttgaagatcccatgctacagacagatgacactcctattaaacgctgtctgcaaaccaaatggccatacattgagttactctggaccacagatcgctctccttcactaaattaatttgtctaagtatttataaggaagatcttaataacagatgttgaaagaaggagtcaagactggcaattggctggattaagctaaacactggtatcactgattaactgtaaataacaattaaaaacacattttcagtgtttatgatatgtttaaattatttgtcctaaagctttatgttaaagattatcctattttacccc

SEQ ID NO: 35613 - DNA, 478 bp, Homo sapiens
  misc_feature (1)...(478): n = A,T,C or G
ggggttnnntttgttgcgtccctagtccgtgtggggaattccaagatgaccgtcttaacaaagaccgatgtgtacgcctagccctggttcatgatatggcagaatgcatcgttggggacatagcaccagcagataacatccccaaagaagaaaaacataggcgagaagaggaagctatgaagcagataacccagctcctaccagaggacctcagaaaggagctctatgaactttgggaagagtacgagacccaatctagtgcagaagccaaatttgtgaagcagctagaccaatgtgaaatgattcttcaagcatctgaatatgaagaccttgaacacaaacctgggagactgcaagacttctatgattccacagcaggaaaattcaatcaccctgagatagtccagcttgtttctgaacttgaggcagaaagaagcactaacatagctgcagctggcagtgagccacactcctgaga

SEQ ID NO: 35614 - DNA, 485 bp, Homo sapiens
  misc_feature (1)...(485): n = A,T,C or G
agcgtnctnnnaatcgatagccctacgctagngccgngcaattcttgaatcatcagctaattctctgaaagatgaattcacatatgaaaaagggggccaccttatcttaattccagaatttagtcttcctttggaatactacctaattcccttccttatcatagtgggcatctgtctcatcttgatagtcattttcatgatcacaaaatttgtccaggatagacatagagctagaagaaacagacttcgtaaagatcaacttaagaaacttcctgttcataaattcaagaaaggagatgagtatgatgtatgtgccatttgtttggatgagtatgaagatggagacaaactcagaatccttccctgttcccatgcttatcactgcaagtgtgtagacccttggctaactaaaaccaaaaaaacctgtccagtgtgcaagcaaaaagtggtttcttctcaaggcgattcaaactctgacacagaca

SEQ ID NO: 35615 - DNA, 456 bp, Homo sapiens
  misc_feature (1)...(456): n = A,T,C or G
natcgagattcgtaggccgtgcggnggaattcgtccagtgtgagatcgacgaggatgtcatccaagtctccaagaagttcctgccaggcatggccattggctactctagctcgaagctgaccctacatgtgggtgacggttttgagttcatgaaacagaatcaggatgccttcgacgtgatcatcactgactcctcagaccccatgggccccgccgaaagtctcttcaaggagtcctattaccagctcatgaagacagccctcaaggaagatggtgtcctctgctgccagggcgagtgccagtggctgcacctggacctcatcaaggagatgcggcagttctgccagtccctgttccccgtggtggcctatgcctactgcaccatccccacctaccccagcggccagatcggcttcatgctgtgcagcaagaacccgagcacgaacttccaggagg

SEQ ID NO: 35616 - DNA, 436 bp, Homo sapiens
tcttttaattttgtcaaatggagacaaatcgttgaatataaagatacctaatgttcgtgagtttatgtgaaaaattgggagaagaaatcagcattttaataaaacaaaattgttttctaaagttagtacttccacagtaccacacacacacgcagattgagaataaacattttcacagaatatgggggaaaaggaggaaaataatccccagccttaggaatccagtttttgttgcatagaactctgacctgattaaggtcagtcattttttttgttgctggtgttggtagctgatcctgcttcagatgatccatctattatttcccctttccgcctttttaaaccatcaccactgacttttagaagccagagtttatatcgtttgtgataagcttcttgggttatcacaataaatcgtaaagctttagggctaaaa

SEQ ID NO: 35617 - DNA, 393 bp, Homo sapiens
  misc_feature (1)...(393): n = A,T,C or G
ccaaaggaattcctgaattttggttaactgtttttaagaatgttgacttgctcagtgatatggttcaggaacacgatgaacctattctgaagcacttgaaagatattaaagtgaagttctcagatgctggccagcctatgagttttgtcttagaatttcactttgaacccaatgaatattttacaaatgaagtgctgacaaagacatacaggatgaggtcagaaccagatgattctgatcccttttcttttgatggaccagaaattatgggttgtacagggtgccagatagattggaaaaaaggaaagaatgtcactttgaaaactattaagaagaagcagaaacacaagggacgtgggacagttcgtactgtgactaanacagtttccaatg

SEQ ID NO: 35618 - DNA, 456 bp, Homo sapiens
  misc_feature (1)...(456): n = A,T,C or G
cattgaaanttagcggacatgcganggacnnngangcccacagnttcctttggaggggcaagaagttggcctctcggttgacattccagtatttttccagacttgcccctacccttttgccgctggtgttgctgcctcacatgaggttattgcaagagttccccttgcaataccctttgtgccctcaagaattaaaagcctctatgatccagagttgctatgcaccaaattttgatgccttctaaataccttgatgcctgtagcactagaaatgctttcctatttaaaataaacattaaattttaaaatagagctttgtatactatgtaagcagttttatatcagctttgtaaaagctttggtgttaagagtcaatattttttggctttgtagataaagacttaaatttttgtgcaacatagtggtgttaaagcacacatccattggactatgcan

SEQ ID NO: 35619 - DNA, 426 bp, Homo sapiens
  misc_feature (1)...(426): n = A,T,C or G
tatacacacacattcactcacattgaagatgcaagatgaagaaagatacatgacattgaatgtacagtcaaagaaaaggagttctgcccaaacatctcaacttacatttaaagattattcagtgacgttgcactggtataaaatcttactgggaatatctggaaccgtgaatggtattctcactttgactttgatctccttgatcctgttggtttctcagggagtattgctaaaatgccaaaaaggaagttgttcaaatgccactcagtatgaggacactggagatctaaaagtgaataatggcacaagaagaaatataagtaataaggacctttgtgcttcgagatctgcagaccagacagtactatgccaatcagaatggctcanataccaagggaagtgttattggttctctaatgagatgan

SEQ ID NO: 35620 - DNA, 390 bp, Homo sapiens
attcagcgtgaggatgataaaccagagacggttattatgagactaaaggcttatgaagaccaaacaaagccagtcctggaatattaccagaaaaaaggggtgctggaaacattctccggaacagaaaccaacaagatttggccctatgtatatgctttcctacaaactaaagttccacaaagaagccagaaagcttcagttactccatgaggagaaatgtgtgtaactattaatagtaagatgggcaaacctcctagtccttgcatttagaagctgcttttcctaagacttctagtatgtatgaattctttgaaaattatattacttttatttctactgattttattttggatactaaggatgtgccaaatgattcggatactaagatgc

SEQ ID NO: 35621 - DNA, 404 bp, Homo sapiens
aaaatttttgatccacccttggttgagtctgtggatatgaagggctggctgtatctggacctgatctcagggcaggagtgggctgggaacaagcggtgtgtaagaactgtttctgggcagaagcagcccaccccacacagactactgcctggcacttggcagttatggaagaacccccaattcccccacttgatctttagaactagaggaaagaaatcactagagcagactcagaccaacttgctgatctctgggtcccaggaacaaaccagactctgctctgagctccagagctaggcaggaccatgtgatggctgaaatctgggtgcttcctgcatgtgggccccggtgccatcacagtggcaggacagggcagttcctccagagctgtgtgacacggagcg

SEQ ID NO: 35622 - DNA, 452 bp, Homo sapiens
cagcaactgcagcgtcttgtccacccagatttcttcagccagaggtctcagactgaaaaggacttctcagagaagcattcgaccctggtgaatgatgcctataagaccctcctggcccccctgagcagaggactgtaccttgtaagctaaagctccatggaatagagattcctgaaaggacagattatgaaatggacaggcaattcctcatagaaataatggaaatcaatgaaaaactcgcagaagctgaaagtgaagctgccatgaaagagattgaatccattgtcaaagctaaacagaaagaatttactgacaatgtgagcagtgcttttgaacaagatgactttgaagaagccaaggaaattttgacaaagatgagatacttttcaaatatagaagaaaagatcaagttaaagaagattcccctttaattgtggatagtttaaagttta

SEQ ID NO: 35623 - DNA, 415 bp, Homo sapiens
cggacgacccacgcgtccccggacgcgtgggtggaggcccggactccccggacacagagccttgcttctcagctggacccacgcagaggccgtcggacaacagtcacaatgagcatgcacctgcttcccaaggcctgaaagctgagcatctgtatattctcatcggggtctcaccggacttcctcttctgactcctcctcctggtcctcttctgcctccatcgccagaatcagataaagcaggggccccccataagcaaggacgaggagcagaagccacagcagaagcctgacctggctgttgatgttctagagaggacagcagacaaggccacagtcaatggacttcctgagaaggacagagagacagacacctcggccctggctgcagggagttcccaggaggtgacgtatgg

SEQ ID NO: 35624 - DNA, 425 bp, Homo sapiens
ttactagagaagtttctctgaacgtgtagagcaccgaaaaccccgaggaagagaggtagcgttttctcctgagcgtgaagccggctttctggcgttgcttggctgcaactgccgtcagccattgatgatcgttcttctctccgtattggggagtgagagggagagaacgcggcctgagtggtttttccttcttgatggctcaatgacagagactagctcgtaaactccggggcgtttctgggctgttcgctcctgcttggcagaggagcgagaaaggttatctcctcctgtttcagcggggacggctcttgggttttctcggggtaggctttttaattatagtcttggcgcgaggcgggggatgctgtgtggcacctcctattggctctttttgcgttttctcccattctcgctccctcttttgg

SEQ ID NO: 35625 - DNA, 475 bp, Homo sapiens
  misc_feature (1)...(475): n = A,T,C or G
aattatatcaagtactctctcagaccacagtggaataaaattggaaattaattccaaaaggaacactcaaaagcatgcaaatacatggtaattaaataacctactcctgaatgattgttgggtcaacaatgatatcaagagggaaatttaaaaattctttgaactgaacgataatagtgacacaacctatcaaaaactctgggatacagcacaagtggagctaagaagaaaattcatagcattaaatgcctatatcaaaaagtctgaaagagcacaaataaacaatctaaggtcacacctcacagaattggagaaactagaacagtccaaatccaaacccagcngangatgataaagaaaaaggggagcgaaaaagaaaaatcatanaattnngggggggtgtcatttagaaagatctatgagggggccacttttaggggggcacggacatatttttttatcttagagaggacaa

SEQ ID NO: 35626 - DNA, 384 bp, Homo sapiens
caaatacccatgcaaagagcttcaaaaagtgaaaccgtgttaaaggaacacaatttttctcactcagacatatttgtttattgaattgcaaagttttattttaaatcagcatttccccaaagaatatatcatatgacgctagttccaaggggcttgactgagtggtgttttgctggggggagacaggggtttgttaatacactttactaaatactgagctgaaaaatgttaaatagatttcacgattgcctccttgaagattttaaagttcattgtggctcttcaaggcgaaatccggtgaaccattcctcacacttacctacaggactcttttctaatggagcatcttgtgaagctagagggtttttttgttgttgttatttg

SEQ ID NO: 35627 - DNA, 419 bp, Homo sapiens
cccagtgggaggtaactgaatcatggggacaggtcttacccgtgctgttcttgtgatagtgaataagtctaacaggatctgatggctctataagggggagtttctctgcacaagctgtctttgtctttgcctgccatccacgtaagacgtgacttgctcctcattgcctttcgccatgattgtgaggcctccccagccatgtggaactgtaagtccattaaacctctctttcttttgtaaattgcctagtctcgggtttgtgaacagactaatacaatggcttttcaccttgcagaataaagtcctacgagatcttcatgctctagctcctggccaggccacctcctcaggagttagatcacttatccgtctctccctggcccacccttctctgtcacatggcttctttgctgaccctg

SEQ ID NO: 35628 - DNA, 410 bp, Homo sapiens
cggacgcgtggggtaaattgctaattgtgccaaatttatgtaatagtttttgtaatgtggaataagaattatgatggaaccattgcacatttttttctgaaacagccagtcaaggcagaacattaatctccaaatgcaagggctgatctatttattcattttggaggttgggtactttattctttctttccgtcatccttttcattgtttcccccggattctaattagtttttattttttttagataactccaatataatcattacagtttatgctttaaatactatgtgctttaaaaaggaaaatgggaccaatttgtctgctaagaatttgattttaggtactataagagtattaggaaaatatatacaactggtgttaatttctagatattttctagaaatcacttg

SEQ ID NO: 35629 - DNA, 468 bp, Homo sapiens
  misc_feature (1)...(468): n = A,T,C or G
atttgagcaggacccttctgttagcatctaaggtaaggttaggacagtcaagataaaataacactgggtgctatattgatgggtaaatgtgtacatcctattccttcctctttatctcacaatttttgtctccactaagcaagaagtaaactaacacttcgtcactctaaagaaataacttatgtaaaactcttagtaaccctgtttgtcttcaaatgagtaaatagaccaaagtggggggacaattttctagttctgtagagggaaaaacatctgagtcaacattttcaaatgcagagggtattggtacatgacgacatggaaaagggcacttttaaacacagcttactcttcctcaagtacagagagtatatagtgaatcaaaactaactacagccattctttntaaagcccaagggatggagcanaggtgtaaggatgttacctgtttgttttaatcagagagca

SEQ ID NO: 35630 - DNA, 422 bp, Homo sapiens
gcgcacagaagaatgtctctttatttctttgcacgatagtagagatagaagacatctttcttcaaatgatgagcatatggtaatcaggaatctctctcttgcgggcctggtttattgaagacgaacagcctgaatatgttcaaactgtgaaggcatccataggtggtcccggatcatcgtggagcccctatcctaccttcaatccatgcttggatttgctgccttgcataaggccataatggttaaaggtgtggatgaagcaaccatcattgacattctaactaagcgaaacaatgcacagcgtcaacagatcaaagcagcatatctccaggaaacaggaaagcccctggatgaaacactgaagaaaagcgttacaggtcaccttgaggaggttgttttagctctgctaaaaactccagcgc

SEQ ID NO: 35631 - DNA, 406 bp, Homo sapiens
cggacgcgtgggcgacccacgcgtccgatctccccccaggatttggagactgtatttccccatggccttcctcctcgctttgtgatgcaggtgaagacattcagagaagcttgcctgatggtaaggaaaccagccctagaacttctgcattacctgaaaaacaccagttttgcttatccagctatacgatatcttctgtatggagagaagggaacaggaaaaaccctaagtctttgccatgttattcatttctgtgcaaaacaggactggctgatactacatattccagatgctcatctttgggtgaaaaattgtcgggatcttctgcagtccagctacaacaaacagcgctttgatcaacctttagaggcttcaacctggctgaagaatttcaaaactacaaatg

SEQ ID NO: 35632 - DNA, 426 bp, Homo sapiens
aacaaaactggcaaagcaggctttttgtttaatttgctctttccctgattgtgttcagagagaaaggttatgattaaatgggctccagatctcttattgcccttattcctccaccccacttcttttagcaaggtctgaaagtttcaaagggagacctataggttaattgtttagttataggcagtgttaaattaggcagattttgacatatttatctttttaccccatccattctaccaaaacctgtgtatttcttgagtttttagtttgagaagctggaaagagagagaagggcctcacagtgatgggttcaggacgggtcaaaggcaaaggcctttgtgatgtgagcaaaggcaaccaaaacttagcctcactccacttttctaaagatggaaattcttttttgggccttggactgcttctagg

SEQ ID NO: 35633 - DNA, 405 bp, Homo sapiens
aatcctcactattgaggatggaatctttgaggtcatgtctacagctggagacacccacttgggtggagaagattttgacaaccgaatggtcaaccattttattgctgagtttaagcgcaagcataagaaggacatcagtgagaacaagagagctgtaagacgcctccgtactgcttgtgaacgtgctaagcgtaccctctcttccagcacccaggccagtattgagatcgattctctctatgaaggaatcgacttctatacctccattacccgcgcccgatttgaagaactgaatgctgacctgttccgtggcaccctggacccagtagagaaagcccttcgagatgccaaactagacaagtcacagattcatgatattggcctggttggtggttctactcgcat

SEQ ID NO: 35634 - DNA, 402 bp, Homo sapiens
agaggagtaactaggggatctgaatatataggccttaattttctgttcatggactgttaaaaggaaaaccaaactttcaaaagggataaacctaaatatttacttgctatcattagagagggaacatcaaatgctgggacatcattactaaccaatagcatcagacactggatttaatggataatcacaatggtcgtaatgtatacagacatatataccacgttctagtatgaatttttcagaaaatacaataataatataatttataaagaacactcttctatgaacaaccaccaccaccatgggctataaatgcaaaaatgtgaaagctgtctgcccagagaaaaaagaaactgatataagaaaataagatttgctattgtaagtggcgcgaccgccccc

SEQ ID NO: 35635 - DNA, 390 bp, Homo sapiens
agcgcattcctaaacagagtccggggggaaatgtactgtagggatccctcctgcacatcagtgggtgcatgtgggaactcttctttagggcttcggtggtaatcatctgggggccctggttttcttgtctaccagataaaccaaaactgggaaggccaagtacagtctctgtggtgcgtattgacgaccccatggagattttgaaaagtgttatttctcttgtccacaggcactttcaagaactttgggatgtaaaaatgaaatgaaacctttacccatgaccaacagtaacaatcattgttttaataatatatacaagctccataactccttttggtgctaatgattccgctatttcacagaccaaacgttttagtacattaatgtcct

SEQ ID NO: 35636 - DNA, 434 bp, Homo sapiens
atgcacaaggaggaacatgaggtggctgtgctgggggcaccccccagcaccatccttccaaggtccaccgtgatcaacattcacagcgagacctccgtgcccgaccatgtcgtctggtccctgttcaacaccctcttcttgaactggtgctgtctgggcttcatagcattcgcctactccgtgaagtctagggacaggaagatggttggcgacgtgaccggggcccaggcctatgcctccaccgccaagtgcctgaacatctgggccctgattctgggcatcctcatgaccattggattcatcctgttactggtattcggctctgtgacagtctaccatattatgttacagataatacaggaaaaacggtgttactattatccgcccatagcctgcaacctttgcactccactgtgcaatgctggccctgcacg

SEQ ID NO: 35637 - DNA, 419 bp, Homo sapiens
  misc_feature (1)...(419): n = A,T,C or G
acgcctgtaatctcagcctcccgagtgagtgggactgcaggtgcccgccaccacgcccggctaattttttgtgtttttggtggagacggagtttcgccttgttggccgggatggtctctatctcctgacctcgtgatccacctgcctcggcctcccagggtgctgggatcacaggtgtgagccaccgcgcctggccggatctttatttttaaaaagttcaatctaagaattctttttcattagtcagtttactcatctataaatatccattgaactattgtctactggaacttaatctccatattatttattttccatttgtttcattttcctacattcttgctttacacgggagaaatcaagtttttctctgctgttttacaagttacacattctaattntgtcctgtggtaacatct

SEQ ID NO: 35638 - DNA, 431 bp, Homo sapiens
aatatgttaagttataaagttctcccaaattccagttgcagtgatcttaccccaaaggaatgttcattttcatcttaaaaaatgctagccataaaaaatagttctccgacagggaggtcttctcatgcagtagtgcaaagtttaaactacataatgtaatatctggtacttaatagtctgcaatggtgtatgaaaaatattccactaggaattaaaaaatccatactctgtaagaaagccctgagggaataataaaactttcctccagagagctggttttccatgtatacactaatcctgcatcacattatggttgtgatattagatcacaaccacagatactttaacattgatattaatatgtatttccagagttgtaaaataattaacttattttctaattggctacccatgttcttagaattttaagt

SEQ ID NO: 35639 - DNA, 419 bp, Homo sapiens
  misc_feature (1)...(419): n = A,T,C or G
aatttttgtatttttactagagacacagtttcatcatgttagccaggctggtctcaaactcctgacctcaagcgatccagccaccttggcctcccaaagtactgggattacagacatgagccactgtgcccagcctgtaagcagtaattttaaaattgatatgtaactcatatactataaaatcctttttttttttttttgaaaaaagttttgttttgaaccccaggtgggagggcgggggccaaatttgggttaatggaaccctccttttccggggtaaagggaattttttggcctaattaaacggaaaagggggaacaacggggccccccccccccccccatttatttttggttttttaataaaaaagggggggtcactatttggcgggggggggcctaaaaccccggaaattggan

SEQ ID NO: 35640 - DNA, 424 bp, Homo sapiens
  misc_feature (1)...(424): n = A,T,C or G
gtagatctgaacatccctgataccccagaagctcctccctgctatatggatgtcattcctgaagatcaccgattggagagcccaaccactcctctgctagatgacatggatggctctcaagacagccctatctttatgtatgcccctgagttcaagttcatgccaccaccgacttatactgaggtggatccctgcatcctcaacaacaatgtgcagtgagcatgtggaagaaaagaagcagctttacctacttgtttctttttgtctctcttcctggacactcactttttcagagactcaacagtctctgcaatggagtgtgggtccaccttagcctctgacttcctaatgtacgaggtggtcagcaggcaatctcctgggccttaaaggatgcggactcatcctcagccagcgcccatgttgn

SEQ ID NO: 35641 - DNA, 402 bp, Homo sapiens
tcaggctgcagaatgcgctttagaaagcattgttttagtccaggcacagtggctcacgcctgtaatcccagcactttgggaggccgaggtgggtggatcacaaggttgggagattgagaccatcctggctaacacagtgaaaccctgtctctactaaaaaaatacaaaaaattagcttggcgtggtggtgggcgcctgtagtcccagcagcttgggaggctgaggctggagaatggtgtgaacccaggaggcggagcttgcagtgagccaagatcgcgccactgcactccagcccgggtgacagagcaagactccgtctcaaaaaaaaaaaaaaaaaaaaaaggggggccccttttaagatttttttggggggccccatttttaccgggttttgaaaaattt

SEQ ID NO: 35642 - DNA, 413 bp, Homo sapiens
cttgactgtatatattgttactgaattgagaatatctgcagaaatgtttactagagaacctgtgactgttgaataacatgtgcccgaacatacacacacacatatgtacacacacacctcagagtactctttcttacagcggactttgctgctgctttctgcatgtgggggacactggtatctcccgtctcagacaaaaggctgatgttctctatgatattggtgttaatatcaaagaattgaatgaatacaacagaattgaggttgaaaaatatttgattgccacattcctttaagcatctttgatgaatactctgcaaagtagcctttaaaaaaatgtaaattttttaaaaagtccacagaggagaatttgctggttagcacaaaacatactgcaaaattgcttctttctg

SEQ ID NO: 35643 - DNA, 403 bp, Homo sapiens
  misc_feature (1)...(403): n = A,T,C or G
cccacgcgtccgcccacgcgtccgggagttgatgggcaccatgctttctcatgaagtagcatttccctaccatcaagccattgttttgtgccattcaggagaggaaaaaaaggaatttatgctgtacatttcagttcagtgtatgaccaaaagcaatatgtttataagaagatgtttgacatactaattattttatatcatttaaaccatactgtagcaacataatatatggagctaatttgtagaattatttttacgatttccaaacaaatgtactgtactgttatataatttattgggaggaccttctcatggaagccattaggaaaacaaactagaggtaaatatcacattaatctgtattatcaatttctcatagacactgtgctaatgtgaattttan

SEQ ID NO: 35644 - DNA, 427 bp, Homo sapiens
cggacgcgtgggtgggggatcagaaggggccatctgggcccagctgtgtacagcgagggtgggcagccccctccactccactctgcttccacaaagtcggctcccgagagctcgaggctgcttctgtttatatgtgcagggcccgggcgggtgaagggtcagagagacggacacaaggagccggcaggagggcggagcgaggatgtcctttcccgggagacaagtcgggaaagcctggctggactgcctcagccccgcgcgcctcctggactcagggttccccgtcctgagctcgggagatgttcagagtcacactgccgcccggtctgccacgcagaggtccaacttgccacccgcgtccctggtacctgagaccaccgacatcctcaggttgctgaccgtggcgcccttctacccagcccagtgt

SEQ ID NO: 35645 - DNA, 417 bp, Homo sapiens
cccacgcgtccgcccacgcgtccgcaagattgtccccattgccatccagctcaaccaaatcccgggagatgagaaccctattttcctcccttcggatgcaaaatacgactggcttttggccaaaatctgggtgcgttccagtgacttccacgtccaccagaccatcacccaccttctgcgaacacatctggtgtctgaggtttttggcattgcaatgtaccgccagctgcctgctgtgcaccccattttcaagctgctggtggcacacgtgagattcaccattgcaatcaacaccaaggcccgtgagcagctcatctgcgagtgtggcctctttgacaaggccaacgccacagggggcggtgggcacgtgcagatggtgcagagggccatgaaggacctgacctatgcctccctgtg

SEQ ID NO: 35646 - DNA, 405 bp, Homo sapiens
gagttttgtaaacagaacactggccaaccattgtgtcatctctaccctcttcccaaggagacatggaaatttacactacagaaggcaagacaaattgtcaagaactccccgattctgaaatattctagacggggttctgacatttgttcactcccggttttggccaagatctgccaaaaaaaaaaaaggggggcggccgttttaaaggatccctggggggcccaattttaacccggggggggaagggatatgctttttccttatgggggggcgttttataggcctctggggaatttttggaaggaaccttttttttggggggggaaattatggggacaacttacctccggaattttgaggctttggggaaaaataaaaattttaaggggtacagggggaaaaccc

SEQ ID NO: 35647 - DNA, 397 bp, Homo sapiens
cccacgcgtccggacattttcaccactccaaaaaagaaaccccacatcgactagcagttactcatttgcttctccctatgtcccctgacaaccactaatctatttgtctctatagatttgccagtttggggcatttcatataaatggaatcatctgtatgtaagtggttaataaggattggttgattgaagattgaaaagggtcagctgggaaaatttttaaaaagactgtttttaaaaaggtgctacaaaataaagggctatctttttctgtttctctttgtactttttattttttatttgtatttattgatgtgaaattcacatataaaattaaccattgtaaagtgaataattcagtggcacttaacagcttcattgacacatccacatatacc

SEQ ID NO: 35648 - DNA, 447 bp, Homo sapiens
ggagatgaggtcaaggagcagacattctctggaggcacctctcaagatacaaaagcatctgagagctcgaagccatggccagatgccacctacggcactggttctgcatcacgggcctcagcagtttctgagctgagtcctcgggagcgaagcccagctctcaaaagccccctccagtctgtggtggtgaggcggcggtcaccccgtcctagccccgtgccaaaacctagtcctccactttccagcacatcccagatgggctcaactctgccgagtggtgccgggtatcagtctgggacacaccaaggtcagttcgaccatggttctgggtccctgagtccatccaaaaagagccctgtgggtaagagtccaccatccactggctccacatatggctcatctcagaaggaggagagtgctgcttcaggaggagcagcctatacaaag

SEQ ID NO: 35649 - DNA, 414 bp, Homo sapiens
  misc_feature (1)...(414): n = A,T,C or G
aacctgggcaaggccacttcaggtgtcctcgttgtgctggatgtagtcaaccttgtgcaagactcactggacttgcacaagggggaaaaatccgagtctgctgagttgctgaggcagtgggctcaggagctggaggagaatctcaatgagctcacccatatccatcagagtctaaaagcaggctaggcccaattgttgcgggaagtcagggaccccaaacggagggactggctgaagccatggcagaagaacgtggattgtgaagatttcatggacatttattagttccccaaattaatacttttataatttcctatgcctgtctttaccgcaatctctaaacacaaattgtgaagatttcatggacacttatcacttccccaatcaatacccttgtgatttcttatgcctgtn

SEQ ID NO: 35650 - DNA, 579 bp, Homo sapiens
  misc_feature (1)...(579): n = A,T,C or G
cactaccacattcactcactactagccgcacattcatcacgcnatgtaccaaaccaatctacatagtatcgcgcatcaacaacataccaannaagaggattgagatcgaggacatgnccgaaanncccgggacgacccacgcgaccgaggatattgtctccattttataaatatggaaaccaaagactataagttaaatgacttatccaaaattgttagctacttctatattgaggactagaactgaagtttcttggtttctagggactttctaataagccctattactgagcacctgtttgtgtgaaggggcagctatggatgccatttaaactcatgtaactgataattaacttttggaatgtagttaccaaatcaaagagcttaccaaaaaatagcccaagactatttaatacaatcttatatagttaccatttgttattaagttaaacctcagttggtattatgaacaggaaaaacattacgctaaccctaaaaaaaatgaatgggtcatttacgattcagaaaggagcctcattacaatttccgatttgagtataatttccatcaccctaatcg

SEQ ID NO: 35651 - DNA, 426 bp, Homo sapiens
ccactggtcatgaaggagccaaaggtgagaagggcgacaaaggtgacctggggcctcgaggggagcgggggcagcatggccccaaaggagagaagggctacccggggattccaccagaacttcaggctggagtgcagtggtgtgatcttggctcactgcagcctccaccaaggttcaagcgattctcttgcctcaacctctggagtagctgggattacagattgcattcatggcttctctggcaacccacttcagcaatcagaacagtgggattatcttcagcagtgttgagaccaacattggaaacttctttgatgacatgactggtagatttggggccccagtatcaggtgtggatttcttcaccttcagcatgatgaagcatgatgatgttgaggaagggtatgtgtacctttatgccaatgg

SEQ ID NO: 35652 - DNA, 393 bp, Homo sapiens
agagtaaacaaaccgccataccccaaactgggaggctatatgaagaagcttgagaattgtaactacgcggtagaattggggaagaatcaagcgaagttctccctggttggcatcggtggacaagatctcaatgaaggaaaccgcactctcacactggccttgatttggcagctaatgagaaggtatacactgaatatcctcgaagaaattggtggtggccagaaggtcaatgatgacattattgtcaactgggtgaatgaaacattgagggaagcagagaaaagttcatccatctctagtttcaaggacccgaagattagtacaagtctgcctgttctggacctcatcgatgccatccaaccaggttccattaactatgaccttctgaagacg

SEQ ID NO: 35653 - DNA, 393 bp, Homo sapiens
  misc_feature (1)...(393): n = A,T,C or G
taacccgggatgctattgagttaaatgcagccaattatacagtgtggcatttccggagagttcttttgaagtcacttcagaaggatctacatgaggaaatgaactacatcactgcaataattgaggagcagcccaaaaactatcaagtttggcatcataggcgagtattagtggaatggctaagagatccatctcaggagcttgaatttattgctgatattcttaatcaggatgcaaagaattatcatgcctggcagcatcgacaatgggttattcaggaatttaaactttgggataatgagctgcagtatgtggaccaacttctgaaagaggatgtgagaaataactctgtctggaaccaaagatacttcgttatttctaacaccactggcn

SEQ ID NO: 35654 - DNA, 400 bp, Homo sapiens
  misc_feature (1)...(400): n = A,T,C or G
ctttgccatcaaggccctcaagaaggatgtggtcctgatcgacgacgacgtggagtgcaccatggttgagaagcgggtgctgacacttgccgcagagaatccctttctcacccacctcatctgcaccttccagaccaaggaccacctgttctttgtgatggagttcctcaacgggggggacctgatgtaccacatccaggacaaaggccgctttgaactctaccgtgccacgttttatgccgctgagataatgtgtggactgcagtttctacacagcaagggcatcatttacagggacctcaaactggacaatgtgctgttggaccgggatggccacatcaagattgccgactttgggatgtgcaaagagaacatattcggggagagccgggccagcacn

SEQ ID NO: 35655 - DNA, 411 bp, Homo sapiens
taactggtaagagcacagagccagaatgctgggcttgaatctcacattttctgctacctagagaggagatttgtgcaaattactccctctgtgcctgggtgtcctcaatactacatgcaaacagtaacactactcacctcataaacttgtttatttcatatttacaaagcccttaaagagtgcctggaacatgcaagtcctgtgtatgtttgcaacttgcattgattttcatgtttctgccattctttctctgaatgtttaatcctttttttgcctgtcctgtcacccttcaggtatctgtctcttgcctctggacatgcatggacatgaccacatggccatatcagtgccattagaggactcatagtttggagtctggcctatggtgcggcagtatgtccctgtaaccag

SEQ ID NO: 35656 - DNA, 401 bp, Homo sapiens
  misc_feature (1)...(401): n = A,T,C or G
ttgctgtgaaaccacttcgatctttgctttagagactcccgctgtcaccatggcactgaacggacagttctgtaagctccattgtaatttaaggcattagaattctcatttcagaactgaatacaggatctggcatatagatgcttcagaatgttcatttatttccaaggatttaaaaaattttccataatatgagattctgtataaaagtgtgctgggtgatatggagcgtagtacaatggaaaaaactataggctttgaaatggagggatctggatcgaaatcttgattatggatcctctggcaagtgatttcctttccggtcattagttccccaatcagtaaaacaccttacacaggttgtgtccacaaaggaaagaattttatttattttattcatn

SEQ ID NO: 35657 - DNA, 408 bp, Homo sapiens
tgaatatatgggctatagcaagtagctttacagtacagatcttacaattaagttttgcttttgttaaagtgtgtaccattttttctgtttggagtaagacaaaaattgttttgacataggttccctagggtacacttgctctagcatactttaaaggccactgttgcaaagtctacattttatgctgaatctgcattctgtcaggcacccgtagaaagacctcagtacatgctttgcactctcctttgctccctttttccaatttcttattgcatatcattttgttgtaatacagaaagcagcatttttaaatgtccgtgttaagaattggcccactggtaccaactcacctctattttgtcagttcatagatgaagattttgttttatttcaaaaacacagtacatt

SEQ ID NO: 35658 - DNA, 406 bp, Homo sapiens
cgccgagatgctggtcatggcgccccgaaccgtcctcctgctgctctcggcggccctggccctgaccgagacctgggccggctcccactccatgaggtatttcgacaccgccatgtcccggcccggccgcggggagccccgcttcatctcagtgggctacgtggacgacacgcagttcgtgaggttcgacagcgacgccgcgagtccgagagaggagccgcgggcgccgtggatagagcaggaggggccggagtattgggaccggaacacacagatcttcaagaccaacacacagactgaccgagagagcctgcggaacctgcgcggctactacaaccagagcgaggccgggtctcacaccctccagagcatgtacggctgcgacgtggggccggacgggcgcctc

SEQ ID NO: 35659 - DNA, 406 bp, Homo sapiens
cggacgcgtgggcaaccaccaccaccactaccaccttcaccttattcctgtgatccaagcggcagtgatttgcctcaagatacaaaagttttgcagtactatttcaatctaggattgcagtgctattaccacagctactggcactccatggtctatgtgccacagatgcagcagcagcttcatgtagagaattatccagtctatactgagccacctctggtagatcaaaccgttcctcaatgctacagtgaggtgaggagagaagatggcatacaggcggaagcatcagcaaatgatacttttccgaatgctgattcttcatctgtccctcatggagcagtctattatccagtaatgtcagatccctatgggcagccacctttgccaggttttgacttctgccttc

SEQ ID NO: 35660 - DNA, 401 bp, Homo sapiens
  misc_feature (1)...(401): n = A,T,C or G
tctatccacatttccattgcagaagatactgagaaacagagctttttgaagagaggacagggccatagcaacaaggaccttcttgggggattaatgggaggtcagtagaattaataaccctccttggatgagtgctactgttttcacatggcttcagatgctatcaacctcaaagaaatgatctcaacagagaagcttattctctcccaacttctacggtaaaatccaggagtattttctctggggatctgcccacaggacaaagtccataaaagcaagtcctgtctggaccatgtggttatctgaagcattagccatcaccagcacaacaaacggggcagggctttccaaggtggggctggtcagaagggaatctttgataagaggcccacaggcagggn

SEQ ID NO: 35661 - DNA, 407 bp, Homo sapiens
cggacgcgtgggcgacgcaaccatggctgaagaacaaccgcaggtcgaattgttcgtgaaggctggcagtgatggggccaagattgggaactgcccattctcccagagactgttcatggtactgtggctcaagggagtcaccttcaatgttaccaccgttgacaccaaaaggcggaccgagacagtgcagaagctgtgcccaggggggcagctcccattcctgctgtatggcactgaagtgcacacagacaccaacaagattgaggaatttctggaggcagtgctgtgccctcccaggtaccccaagctggcagctctgaaccctgagtccaacacagctgggctggacatatttgccaaattttctgcctacatcaagaattcaaacccagcactcaatgacaatc

SEQ ID NO: 35662 - DNA, 425 bp, Homo sapiens
tggtgaacacgttcagttcatcagggcctacgctccgggaaggggcccccagctgtggctctgccatgccgggctgtgtttgcagctgtccgagtctccatccacctttagaaaaccagccacttcttttcataagcactgacagggcccagcccacagccacaggtgcgatcagtgcctcacgcaggcaaatgcactgaaacccaggggcacacgcgcgcagagtgaacagtgagttcccccgacagcccacgacagccaggactgccctccccaccccaccccaccccaggagcacggcacacagttcagcctctgagctggctcacacgtgccatccccaccccggtgctccagggaaggaggacacggacccgacgtgggaggtcctcaggcagcagtggcgcctggtgtcaggtctgtct

SEQ ID NO: 35663 - DNA, 471 bp, Homo sapiens
  misc_feature (1)...(471): n = A,T,C or G
cccacgcgtncgcccacgcgtncgtctgaatagcttcattgatgagaacccctcgggattacctataggggaggctatagatcgtatacatgggagtgtcgctctggaaacattaaggcagcagcaggcacggttccagcagtggagcgagcatcatgcctttctcagtcagggcagcgttccatacccacaccatcaccatcctcacctccagcatcttcctcagccgcccctgggattacatcagccgccagtgagggcagactggaagctcaccagcagtgccgaagatgaagtggagaccacatactcaaggtattccagcggactgaaaatagcccctggaatgcgaccccctcactgttctctnttttgactgcagtccttttagcttcaagctggaatattgcctcagagaaattggatgctggccttccaagcacacgctacacagttctcttgtgactctaa

SEQ ID NO: 35664 - DNA, 436 bp, Homo sapiens
ctgcaagataatttgtacaatgaagaaagttctgttattaactaaattttccattagtcattcaacgaatactagactgagttttctccatatacggttgcgctgttctagatgttgtgggagctacaaagacgtacaaagaagtgggagctacaaagaagtatgaagatctctttgaacacatgcagattatgttaatgatatgtgataaagtaatgtaacactgccacatagtaatcattagctatgtgtttttgaatcccaaaatataattttatttaaaatcagcttatagataaggcagtaagaactagaacactgctaatatacaaaaatgtaattataaatatgaagtcactgacactctatgaaggattatatactatattttagtttggagcatccagatattttcaggagtctattcttctattac

SEQ ID NO: 35665 - DNA, 418 bp, Homo sapiens
cccacgcgtccgcctgattgagagaggagggtgtccgagcctctttgggctgagacaacgttttcccgggcgctctgtgcctcagcctgaggtaccggggcccgagccgcacgggcgctgctgttcactggtggcgctgcctggcgcccggttacgcgcactcagagaccttatgttagctccagtgagtcctgctgtgtcacatccctctttcctgtaggagcacgagtgtggcttttttttggattgtttttaacctctgacattctgattcaagatattgcatttctctctccactgtctctgatcttcctggccaaatttctcaagaaggcagacacacgagacagcagactagcctgcctgggtgagcgctagccctttcgggccgagttcttcgtgctgggaacctaagagg

SEQ ID NO: 35666 - DNA, 416 bp, Homo sapiens
  misc_feature (1)...(416): n = A,T,C or G
caaagtctcccggagcccaatttccggaagcggtgagttctgaaagaagttcctgcaccgtactttcccaagactgcgaatccccaaccatgagcgcctcgggcgtactgtactttacccagcaaggatgggagcaggtgctggccaaagtgaaacgggctgtggtttacctggacgccgcctgcgccgagagcctgcactggggctgcggatccacccgtctcctggaggcggcggggggtcctgactgtcacctgcgagagttcgagcccgacgcaattggtggtggagccaagcagcccaaggcagtgtttgagctgagctgcctgctgaaaggccggaccgtggagatcctacgggacatcatctgccgcagacacttccagtattgtgtggtgggcacaaccgggagccan

SEQ ID NO: 35667 - DNA, 426 bp, Homo sapiens
tcaggaagtttcctgcaggaggccatgttatttctttactctctttgtaaagaaacaatttacaaaaaatgttgagtcttgccctaggaggaaggcggtcctggagacaatggctttgccctgaagaagaccatgctgttgaacaccatataaatgatgtggcagtgagagccgaaggctgtgggatctgagagctggctcagcctcactgcccaccagtcatgggatcttggtgaaatcaccaattcctctgagccccagtttcctcatctgtaacgtggatttcataaaaatcacttcttgtattgtaagcgttgaaagcatgaatatacatataatgtaaataatttctcattggataaatcacatgaaaagtactcaataaataaaacattattggttgttaattcttgatttagagccatc

SEQ ID NO: 35668 - DNA, 507 bp, Homo sapiens
tggggttcccggacaaccccccacttaagaccactgacgccctcggaccgcccggaatcccggtcgacccacgcgtccgcccacgcgtgcggttttgaactcctgaactcaggtgatccacctgcctgggcctcccaaagtgctgggattacaggtgtgagccaccgcaccaggcctgaattcttatatatttataattctatatttgcttgtttttttttttgtttttgattggtttggtttggtttagaaaatcacttgaacctggaaagcggaggttgcagcgagccaaaataatgcctttgcgctccatcttaggatgacaaagcgagactctgtcaaaaaaaaaaaaaactttgccacactgaaagagctgcggcgaaacttttttcgaggggattttgaacaaattctgggtttttttttttaatgtggggctcgttttttgccgggaccctttcattaaagtcttctgtttaaagcaactttaaaaaagaaaaaatattt

SEQ ID NO: 35669 - DNA, 436 bp, Homo sapiens
tgctgaggacacagctgtgaacaagattttccaggctctgtgagagcagagaccttgactgtgttgctcactattgcattgccaacttctaaaatagtgcctggcatatagtaggtgctcagtaatccggggtcagcaaactatggcccacgggacaaatctggtctgctgcctgctttgtcaatggaattttatgggaatacagcaacactgttttgtttacatgttgtgtatggttgcttttcccctataatggcagagctgaacagttgacagagactacatgtcgcacaaagcctgaaatatttattctgtggtcttttgcgggaaaagtttgtttctaatgtagctggctatttgcctagataaaaatggatacttctattacaatggaaaaggagataaatttttgttaattttatacttatgatagaag

SEQ ID NO: 35670 - DNA, 416 bp, Homo sapiens
cccacgcgtgcgctggattgcacatgatggagggacaaagcaaggagctccagaggaagagactcttggaggtaatggcactgttacagaatttcacagatctcagctggtggttttcttcaggttccagcctctcttggcatctgctgccttgtttcctgtggaaacagcaagcagctctgcacggttcttctcatccttgccttgcagaagagcctgtttatttttgcctctgtcacttcctgaagaaatcagtgtattttcaatacagtgtggctcctttctcctaggttcagttaggtcgtgtttcctagcagagtcactattcaagggttgagtccacgtcttgctctctggagaatgtcaatgtaatgtatttttcccatcgtacagagtctttgttgatttgcaaaatg

SEQ ID NO: 35671 - DNA, 213 bp, Homo sapiens
  misc_feature (1)...(213): n = A,T,C or G
acatgtgagtataaaaagcaaaggtaagcattattctattagtagtaaaagaggacatgggattttaaaactatacctaaattcttgcaattaacttttatgggcttggacattgttgaaatgagaaaataatataatatagcttcctggcanggtaggncaacacttgattttgctattcttctgactttttgaaaccctgaagttctgaat

SEQ ID NO: 35672 - DNA, 400 bp, Homo sapiens
ctctctcactttctttagttgtgccttgccctatcgcctcccattttcccttcaaagtagaatgtcttgtaaagacacagtaactcctgtgtgttttgattagtgagatgttaccacttaccccttctgctgcgcagaataatattaagaattgctatgcttatgattcaggctggacagcctggacattttgagcagcgcgagagtagaagtgaatacccccaggaactccaattgtgctgaagctgatttgtctgttcgtaggatgatgtgcagcctgtcacagtggcagccacaggcattcagtttgtgggcatttcctgtcatttcggatcctgctatagggaaggttcagctctcctgtctggggcatctactggagcacctcagaagacaagga

SEQ ID NO: 35673 - DNA, 418 bp, Homo sapiens
cggacgcgtgggggcggccgacttatccggtggcacgacagttgctgcagggaatcttttaaacgagagcgagaaggactgcgggcaggaccggcgggctcctggggttcagccgtgccgcctcgttacgatgaccagtgtggttaagacagtgtatagcctgcagcccccctctgcgctgagcggcggccagccggcagacacacaaactcgggccacttctaagagtctcttacctgttaggtccaaagaagtcgatgtttccaaacagcttcattcaggaggtccagagaatgatgttacaaaaatcaccaaactgagacgagagaatgggcaaatgaaagctactgacactgccaccagaaggaatgtcagaaaaggctacaaaccactgagtaagcaaaaatcagaggaagag

SEQ ID NO: 35674 - DNA, 443 bp, Homo sapiens
aaaacccagagttttgagggtagggtttgataaccaggtttaccaatgggaaatggggtgggggaaggtttaagttgaagcaagaggagtgctttaaactctggtggtaactctgatttaacaaatgctaggaagacctgctttttgctaggtcctgtgcaacactgtaatgatagtgatccataaaatgcactcctagatggaggctcaaagtctaaaaaatctttccaaatttaatcctcataaactccctgttaaatacgtgtgaaactattttgtgccttaatatagagaaggtaacttgtccagtgtgcagctagtgtgtggtggagttggccgtaaacaggttctaaaatccttgctcttggtgaggtgtctcttgctaatatccctttaccttttaattttagttcttaacacatagccccttatgtgttgttttt

SEQ ID NO: 35675 - DNA, 404 bp, Homo sapiens
aattactgaagcaaagctctcatatttgtctctcattcttattgtataaaaattctaagcacataactgtcccctttattgtataattccaactacataactgtcctattattacttaccagacatcacattcccagtcattgtcacagctcctgaatcttgttccatttcttccacaagcaggctaattttaccccttcttcaatgacagaagaggcctgggctatggctgagcctaaatatatttgctatttcaggtgacatttagtgatgtggctatagacttctctcatgaagagtgggcatgcctagattctgctcagagggacttatacaaggatgtgatggtccagaattatgagaacctggtctctgtaggtaaggatatcaccccttccactcca

SEQ ID NO: 35676 - DNA, 466 bp, Homo sapiens
  misc_feature (1)...(466): n = A,T,C or G
nttgatcgccttggaccgcccggattcccgttgaacacctcgtacgggcgccgnggagggtcaggtcgtttctgcgcgggcttccggcgctgctactgctgctgctcttcttcgggccctggcccgctgcgagccacggcggggagtactcgcgggagaagaaccagcccaagccgtccccgaaacgcgagtccggagaggagttccgcatggagaagttgaaccagctgtgggagaaggcccagcgactgcatcttcctcccgtgaggctggccgagctccacgctgatctgaagatacaggagagggacgaactcgcctggaagaaactaaagcttgacggcttggacgaagatggggagaaggaagcgagactcatacgcaacctcaatgtcatcttggccaagtatggtctggacggaaagaaggacgctcggcaggtgaccagcaactccctcagtggccn

SEQ ID NO: 35677 - DNA, 422 bp, Homo sapiens
  misc_feature (1)...(422): n = A,T,C or G
cggacgcgtgggcggngcgctccgctggcttcttggacaattgcgccatgtgtgctgctcggctagcggcggcggcggcggcggcccagtcggtgtatgccttctcggcgcgcccgctggccggcggggagcctgtgagcctgggctccctgcggggcaaggtactacttatcgagaatgtggcgtccctctgaggcaccacggtccgggactacacccagatgaacgagctgcagcggcgcctcggaccccggggcctggtggtgctcggcttcccgtgcaaccagtttgggcatcaggagaacgccaagaacgaagagattctgaattccctcaagtacgtccggcctggtggtgggttcgagcccaacttcatgctcttcnagaagtgcgaggtgaacggtgcgggggcgcaccctctt

SEQ ID NO: 35678 - DNA, 462 bp, Homo sapiens
cggacgcgtgggcgggtcacggcaccccgaaccctcctcctgctgctctggggggccctggccctgaccgagacctgggccggctcccactccatgaggtatttctacaccgccatgtcccggcccggccgcggggagccccgcttcatcgcagtgggctacgtggacgacacgcagttcgtgaggttcgacagcgacgccgcgagtccgagagaggagccgcgggcgccgtggatagagcaggaggggccggagtattgggaccggaacacacagatctacaaggcccaggcacagactgaccgagagagcctgcggaacctgcgcggctactacaaccagagcgaggccgggtctcacacttggcagacgatgtatggctgcgacctggggccggacgggcgcctcctccgcgggcataaccagttagcctacgacggcaaggattacatcgccctgaac

SEQ ID NO: 35679 - DNA, 445 bp, Homo sapiens
tggctctaacactgtggaccataagaatgaaatcaaacagattgctaatgaaatccctgtttcctctaacagaagagatgaatatggattaccctctcagcctaaacaaaataagaaattagcatcttatatgaacaagcctcacagtgctaatgagtaccataatgttcagtctatggacaatatgtgttggcctgcccccagccagatccctcctgtatccacaccagtaactgaactttctcgaatttgttcccttgttggaatgccacaacctgatttctcctttcttaggatgccacagacaatgaccgtttgccaagtaaaattatctaatggcttactggtacatgggccacagtgccactctgaaaatgaagccaaagagaaagctgcactttttgctttacaacagttgggctccttaggcatgaatttccctttg

SEQ ID NO: 35680 - DNA, 414 bp, Homo sapiens
gactggtctctccttaccatcataagggattcaatgttatcaagctttgcgaatgtcctccaggattataaaactatatataaacatatgatatggaattacaggggttttggttgcgtttatttctgcgatttgtcaaatggtttgctaataaagggatgatactatgtgatataaaaaagctaaaactacgggggggcccctcctaagcccacccactggggccccaattttcccctgctgaggcctgagcacccccctcccttattgtgactcaatttatacccgccccggggacttttgaaaaggcccccttttttgggggcgctgctctttgggcccacctccctccagaacttaaagcccctggggatattctaagttttttaagcgggacttggggaaaacttcccg

SEQ ID NO: 35681 - DNA, 486 bp, Homo sapiens
  misc_feature (1)...(486): n = A,T,C or G
cccccccccccncccnattgaacgccttaggatttgatcgcattcccgggnccacccacgcgtccgtgttacatattgaagtttcttggttgccaaagaaaaacggattctgctgaacttgtggacagaacaaccccaaggttggaagaacaatgaaaaataatctatacttgaacatttcaaaagttaaaattttcaacagagttttaacacactgaagcttaaaatacattgacactgaaatgtcaatgggcaaacaccaatttcgccgttcattatgaaatacatcaaacaaaacttgccaaaaatacaaccataaaaatatagcaaatgtatgtatgagcaaactaatgctaaaaatgtctaattttcttggctagtctttcaaggaccagattcatgagtgttatttgaagggaaaaagtgaaatacttggaattattttgagtgatgtgctcctgagcttgttcttaaaatctaccagtg

SEQ ID NO: 35682 - DNA, 419 bp, Homo sapiens
cgtgcagggaccccgcgcacaggagctgccctcgcgacatgggtcacccgccgctgctgccgctgctgctgctgctccacacctgcgtcccagcctcttggggcctgcggtgcatgcagtgtaagaccaacggggattgccgtgtggaagagtgcgccctgggacaggacctctgcaggaccacgatcgtgcgcttgtgggaagaaggagaagagctggagctggtggagaaaagctgtacccactcagagaagaccaacaggaccctgagctatcggactggcttgaagatcaccagccttaccgaggttgtgtgtgggttagacttgtgcaaccagggcaactctggccgggctgtcacctattcccgaagccgctacctcgaatgcatttcctgtggctcatcagacatgagctgg

SEQ ID NO: 35683 - DNA, 479 bp, Homo sapiens
  misc_feature (1)...(479): n = A,T,C or G
cgcgctcccnattgaggtagattctgcggaacngcnacggaannnnnggatcgaccgcacgcgtccgcccacgcgttcgagctaatatggcggcggctttagttttatgttgtgngaggatcccggggccgcggcgtcgctcggtccccgtcatggccgtcaccatcacgctcaaaacgctgccttaccataccttcaagatccgcatggagcctgacgagacggtgaaggtgctaaaggagaagatagaagctgagaagggtcgtgatgccttccccgtggctggacagaaactcatctatgccggcaagatcttgagtgacgatgtccctatcagggactatcgcatcgatgagaagaactttgtggtcgtcatggtgaccaagaccaaagccggccagggtacctcagcacccccagaggcctcacccacagctgccccagaggcctctacatcctttccgcctgcccccacctcg

SEQ ID NO: 35684 - DNA, 419 bp, Homo sapiens
  misc_feature (1)...(419): n = A,T,C or G
cgtggagagacggtcatgctgcggcgtggacacttgtcattcagggacgtggccatagaattccctcaggaggagtggaaatgtctggaccctgctcagaggactttatacagggaagtgatggtggagaactacaggaacctggtctttctgggaatctgtcttcctgacctgagtgttatctccatgttggagcaaaggagagatccccggaatctgcagagtgaagtgaaaatagcaaacaatccaggtggcagggagtgcatcaaaggtgtgaacgcagagtctcgctctgtcacccaggctggagtgcaatgccgcgatctcggctcactgcaaccttcgcttcctggattcaagcaattcttctgcatcggcctccccaagtgctaagattacaggcgtgatcctccgcgccn

SEQ ID NO: 35685 - DNA, 419 bp, Homo sapiens
gcccggccgggccatggattcaatgcctgagcccgcgtcccgctgtcttctgcttcttcccttgctgctggtgatgctggtgctgctgccggccccggagctgggcccgagccaggccggagctgaggagaacgactgggttcgcctgcccagcaaatgcgaagagtgtaaatatgttgctgtggagctgaagtcagcctttgaggaaaccggcaagaccaaggaggtgattggcacgggctatggcatcctggaccagaaggcctctggagtcaaatacaccaagtccatttcagatcccccagaccagatgacctatcttccttccagctctgagtcacttcccattgggacttgcggttaatcgaagtcactgagaccatttgcaagaggctcctggattataacctgcacaaggg

SEQ ID NO: 35686 - DNA, 408 bp, Homo sapiens
  misc_feature (1)...(408): n = A,T,C or G
cggacgcgtgggcggacgcgtggggagcgcagcgtggtggagagtgagctgtgctgggaccattgtttccgtaacctcgttttctgtgtccagctgacacaccttcaaagtggcatcaggtcctaaactgtagcttgcaatgtgcctgtttccagaaaccaaggtgaaagtgctttaaagtcccttcccagctttttttctggaaatgcatgtttctctgaactctgagtcccaagaaaaatcacttgagacaccaagaaaatgggggaagtgctaaaattgtgtgggaattcaagcttaacaataaacatcaagacatttttgataaaaatgaatccactgacatcggggaggagcaagagaacagcacgctgacactgngtcagaggctaagaccgacatttctgg

SEQ ID NO: 35687 - DNA, 515 bp, Homo sapiens
  misc_feature (1)...(515): n = A,T,C or G
tggtctcnggnaaagaaaaaactgatgccgtgcgaattgaccgccttcgggagnggacccacgcgtccgcggacgcgtggggtgccatagagaatgagctactggccaggaacatccatgtgatccgacgaacatttgaagatatctctgaaaaggggtctctggaccaagaccgaaggctgtttgtggatggccaggaaattgctgtggtttacttccgggatggctacatgcctcgtcagtacagtctacagaattgggaagcacgtctactgctggagaggtcacatgctgccaagtgcccagacattgccacccagctggctgggactaagaaggtgcagcaggagctaagcaggccgggcatgctggagatgttgctccctggccagcctgaggctgtggcccgcctccgcgccacctttgctggcctctactcactggatgtgggtgaagaaggggaccaggccatcgccgaggcccttgctgcccctagccggtttgtgctaaagccc

SEQ ID NO: 35688 - DNA, 457 bp, Homo sapiens
  misc_feature (1)...(457): n = A,T,C or G
caaccttggctgagtgacttaactactctgtgccttcatgttttctgtcagtaagatggggataatcacaccagctcatgatgttcatcatttctcttcttgtcattgattagctttctgtgatccactgtgacctggagagacagggtcaagtggtgagctcaggattctggtgacccgaaataacccccactgctcaggagagcctggatgccgtgcatggggccagaggggcctgtgctcatgcttgcagggaagcactgtgcagctggcgggtagtgggcagtgtattttcccagctaggatgcactttctccatgtgttgtcctgggagtggcccatggccacccagcctccagggtcctcaggccctgtggcaccactcagggtaggagctcctctcctcatctgatgggttgccaaagtgctagaagtcangggactgggctgagccagn

SEQ ID NO: 35689 - DNA, 410 bp, Homo sapiens
gattataattgttaaaagataatgagagcatatcattgtacagtacgtgtcaactgtgagcctaactgatctatcaatactttctttctttaacaaagaagaaacaacaatcagaatgtcagttatttttattcaactaaaaggattaaaaaatttatttggtttgtgttctgtccattataaaatactagtaaagtattaacaaacagaaaaaagaaaaaaaggggggggcggttttaaagaatccttgaagggccccaaatttacccgggaaggcaatgaaaaaattttttccttatagggagcccaattaaacccaagctcggaagcttagaaaaggaaccttttttttggggggggactaatggggccaaccaccctacaaaaattaaagccttaagggaaaataa

SEQ ID NO: 35690 - DNA, 406 bp, Homo sapiens
agatgtctcctcctccccagcctatgagttcagacttggggggctccatctgtccctccctgaggtccctcatcttgtccctgctctgattctgtcagcagatcctgaacactccttggtggggacccatgcctccaaggctgcccccaatgccagctgtcctggggaaactccccagaactctcggggaaaggcccgagaaccttcggaggaagcctccgggactcctcgccacctgctctgtttctctcccggccccactgccttcaggtatcaggaagagggcaggcccctgtgccccctctccccttcccagggcggccaacaatactccaccatggggcgcttcctttcttctctggaaactaagacattggactgaaggaactggcctgaggggggctga

SEQ ID NO: 35691 - DNA, 472 bp, Homo sapiens
  misc_feature (1)...(472): n = A,T,C or G
cgtttatgtgcatgtgtgtgcatgagcacatgtgtgtgtatgtgcgcacatggttgtgtgtgcatgcaagggcccaacccaaagctactgacttccccctccagccctcatcacctcctggaaggtcctaaccagccaggcctaagttcacacccaaaggatttgtttttttcttcccttttctttccgcgcaaatttcaattaatacagtgggttctaaagcctgtcatttttaagaggctgtagtttttgcttagtctgttctgggtcccaaaccagcaacttggagaagttggtgggcagtgttggaacaaggcctgggagacagatgcaggaagagtggagggccaagtggagggcacgcgggcggggcctcttgtggcagctcccgcccacacagggcaaaggggagaaaacttccccatcctgcnactgacactgctgatttctgctcctcaaggctgtgggcagc

SEQ ID NO: 35692 - DNA, 383 bp, Homo sapiens
cggacgcgtgggcgacccacgcgtccggcatttattatatttgagagaaaataagcacaaggaagaaaatgtgcattatctataatgcttacacccaggacaataatccttggaatagagtgtctcactttgtgtatagaaacgaaacttttaaaatgccattttattttttaattaaaattttttctttccttttttttcctcctcagaggtagaaaggataaaaatgttattgattaataagactgtagctttatgttgatattttgaaattttaggctaatgcttgtttgatcctgtaacatataagcacattcagtactattagaactgttgcgttatgcaataacatgactgcctaaagcgtatatcaagattagtcc

SEQ ID NO: 35693 - DNA, 394 bp, Homo sapiens
cccacgcgtccgtttggccttaactatgccaatctaattataattccctgtatttaaaatggtttcttttacttattgaaaggcattttagtgtggtttatgtgtaatattaaagattattcaacacctctcacatcttacagatctataaggtcacatgcttttaaaatagtagcaagttaaacttcactcttgaattctttacaatctaagtcaaactaagttataatttaggattgtctttaaacagccattcagaaacaaaactgtagaactgtgtatttgattgggaatggtgcttttgccaacttaaaaggattaaagtaacggagatataaaaaaaaaaaaaaaaaaaaaaagggcggccgttttaaagaatccctcggggggccca

SEQ ID NO: 35694 - DNA, 421 bp, Homo sapiens
ctttagatattaaagttaaaccatccactccctcaccttcagccttcagtgaatgtgctttctagatgtcaggaatgctgaagaattaacactttgactcctaaatgtgatactggtttgtagattcccttacagcagaaaggagaggggcacatattaatttgaatcgcttttgcttctctttggtcttttgagtcttaaaatttggaagtggttcatttctgttgctggaatgaggatttcgaatacttactgatcgaaaaccatatcctgtcatttaataaaaaaaactaaggacgaaaaaaccctccaattttcccaaatgcaatcagaggaactaggggctgtgtttctgcattaaaatagatgtttcaggctttcggggcctgatcaaggtcctcattaaaaaattggagttcac

SEQ ID NO: 35695 - DNA, 411 bp, Homo sapiens
cggacgcgtgggcacggccggggacacccacctgggtggggaggactttgacaacaggctggtgaaccacttcgtggaggagttcaagagaaaacacaagaaggacatcagccagaacaagcgagccgtgaggcggctgcgcaccgcctgcgagagggccaagaggaccctgtcgtccagcacccaggccagcctggagatcgactccctgtttgagggcatcgacttctacacgtccatcaccagggcgaggttcgaggagctgtgctccgacctgttccgaagcaccctggagcccgtggagaaggctctgcgcgacgccaagctggacaaggcccagattcacgacctggtcctggtcgggggctccacccgcatccccaaggtgcagaagctgctgcaggacttctt

SEQ ID NO: 35696 - DNA, 458 bp, Homo sapiens
cggacgcgtgggtgaatttgcactaataaagtcctttgttggtatgtgaattctctttgttgctgttgcaaacagtgcatcttacacaacttcactcaattcaaaagaaaactccattaaaagtactaatgaaaaaacatgacatactgtcaaagtcctcatatctaggaaagacacagaaactctctttgtcacagaaactctctgtgtctttcctagacataatagagttgtttttcaactctatctttgaatgtggataccctgaattttgtataattagtgtaaatacagtgttcagtccttcaagtgatatttttatttttttattcataccactagctacttgttttctaatctgcttcattctaatgcttatattcatcttttccctaaatttgggatgctgcagatcctacatcattcagatagaaaccttttttttttcagaattataa

SEQ ID NO: 35697 - DNA, 472 bp, Homo sapiens
  misc_feature (1)...(472): n = A,T,C or G
aaagaaaccaaaggaatgatctcattaaaagtaattcccaaccagcaaagccgtcttcctgcactacagatgttcatgagagcgcagtttgactatgatcccaaaaaggacaatctgatcccttgcaaggaggcgggactgaagtttgctactggggacattatccagattatcaacaaggatgacagcaattggtggcagggacgggtggaaggctcctccaaggagtcagcaggattgatcccttcccctgagctgcaggaatggcgagtggcaagtatggctcagtcagctcctagcgaagccccgagctgcagtccctttgggaagaagaagaagtacaaagacaaatatctggccaagcacagctcgatttttgatcagatggatgttgtttcctacgaggaagtcgttcggctccctgcattcaagaggaagaccctggtgctgatcggagccagtggggtgggtn

SEQ ID NO: 35698 - DNA, 398 bp, Homo sapiens
atgcctgcctttgtgaacagttaatattctttgactttttcagacatttgccattcacaagggagcattgtagcctgctgtagaccattccagcaaatgtcaaaatgcagggcaagatgtgtgtcgactatgttttttatgtttaagttacttacttatttcttcaggtaagagtggaccaaataacaatactgaaaagccctccccttgccaggccgaggaaataaagcttaagtgaaacagctcttgggggaaaaatgccactttacaaatacttttctaacaaaatagcattataatgaagctcttacttaattccattatttatatgttgacgtgaatgtaagtggttaaaaagtattcatgtgggacatctcattactttgtagctgtggctt

SEQ ID NO: 35699 - DNA, 403 bp, Homo sapiens
gtgagtctcagggtgaatgcctatgggtgcatctggttaggaacagtggtttcccagggcctctcattgatgtttgactttcatagatgacaaaactcacatttgtccacattcaagagcctcgcgtttcatgtgagtccctttgagatgaatgtctgcatatctgtatatagttttgcctgttctaacagagttacccaaattaactgtgactagaataagatagaagattattttcttctaacaaaaagtctggctgttagtccagagaaagtggggtggttccataatcacccaggacctcctcttctatcttgttgctctgccttccccaatattcagtttccacctcatggtccaagatagctgctgaagctccagccgccacatttgtgtttgagtg

SEQ ID NO: 35700 - DNA, 425 bp, Homo sapiens
acgctgtctctccatgccaggactgagttgtgggggagggaggcggttagcgggctttagcgccttttctggcggcggtagatttgaagcgcttcaaaggaccggacccagagaagaggaaaactctaccggtgcaggagcacagggatcagttgtccttgtttttttttggtcttttcttcatttgaagattaagtattggagccatgggaataaaggttcaacgtcctcgatgtttttttgacattgccattaacaatcaacctgctggaagagttgtctttgaattattttctgatgtgtgccccaaaacatgcgagaactttcgttgtctttgtacaggtgaaaaggggaccgggaaatcaactcagaaaccattacattataagagttgtctctttcacagagttgtcaaggattttatg

SEQ ID NO: 35701 - DNA, 428 bp, Homo sapiens
cggacgcgtgggctaagatctggcctgttcattttcaaggtattcttgagaggttcttggagagattctgggagccaaacactccattgggatcctagctgctttagagaacaccttgtaatggagccttcatctcttgagctgccggctgacacagtgcagcgcattgcggctgaactcaaatgccacccaacggatgagagggtggctctccacctaaatgaggaagatatgctgaggcacttcagggagtgcttttatattcccaaaatacaggatctgcctccagttgatttatcattagtgaataaagatgaaaatgccatctatttcttgggaaattctcttggccttcaaccaaaaatggttaaaacatatcttgaagaagaactagataagtgggccaaaatagcagcctatggtcatgg

SEQ ID NO: 35702 - DNA, 488 bp, Homo sapiens
  misc_feature (1)...(488): n = A,T,C or G
ccccccccccatagaacccccttcgatagagcgccgtaagnaccggctcgacccacgcgtccgctccctcccacttgaataggaagcaggagcagcatgtcaggttgcatgttgaggaagtcagaagttaacttgagctgaggttgcagctctggagagattgaggagcagacttttctcttgtcactttggaaggagaggattgtgaggctgcccctttaaatagcattcccgtaggaggcagatcacatccatccgtcacctactgccaaagcatcatttttggtttctatcaaactcaaagcttgttggaaaggattgtggggttaggggagtgaggaggcatagcctcctaggggtagggggcagtttataagctgaaaaggagaggaatgagaaggagcctgggaaaggtgggggatgaggacaagaggaaaagacagggagagaatagttgtcttttgagccttagaagtgaacaaagatac

SEQ ID NO: 35703 - DNA, 401 bp, Homo sapiens
aagtacctactgtaagtctccctctaggccctactcagaagacctgtgctatttacagagtgactgtgcactggggaaagcaaactacccaggccttctgagatgactgaagcattggctctgaattgatgttcatgcacggggacccaaagtgacagcgtggccactagtcaaaatgggagattaatggtggttaggtgacagataccttactaaaagtttttttttgttgttttgttttgttttcctaatctggatgcgtactcaattagggaaaaaaaaaaaaaaaaaacagtttttttgcccatggagttattttttctcctttaataggtaaaaaaaggaaaatactttgaaaaaaaaaaaaaagggggggccttttaaaagaacccttggggggc

SEQ ID NO: 35704 - DNA, 418 bp, Homo sapiens
cccacgcgtccggcaggagaagaggctgaaagggaatgctggaggtcttataaaccacattaagggatttgaaggctactcttagctcaattggaaggttacctacaaaagtagaagtatgatataagcagatttgtactttaggaaaattggaaaacaaagctggtggcagggagtccagttaggaagctgttggctcaatcaggctaaagatgttggtgacccggattaaggtagtagtcattgaaatggagagaactgaatgagtttgagaaatatttgggagatggtatcaacagtatttggtgattgaagaagaggtataacatattaattaagaaaaagactgtagagcccagacatctgggttcaagtcctaagtctgtcacttagtagctttgtaaatttgagtcagttt

SEQ ID NO: 35705 - DNA, 425 bp, Homo sapiens
ttggaagcaagatgaggaggtcgttgagatttgttattaggcggaagacagcgtacaggaaatcgcgatgtcctcccaaagtgcccattgtgattaaggacgatagccttcccgcggggccccctccacagatccgcatcctcaagaggcccaccatcaacggtgtgggcagcagccccaactccaccagcaggcccacccttccagtcaagtccctatcacagcgagaggccgagtacgccgaggcccggaagcggatcctgggcagcgccagccccgaggaagagcaagataaacccatcctcgacaggccaaccaggatctcccaacccgagagacagcaggcaggccaataatgtgatcagacagactttgggtcctgatgggtcttaaggctttaaacagcgcagataaatgcatgctag

SEQ ID NO: 35706 - DNA, 413 bp, Homo sapiens
  misc_feature (1)...(413): n = A,T,C or G
gcggcggcagggctgagccagcgacgccctccattcactctccgcgcccgttctccggctgtcctcccgttccgctgcccgccctgccaccatgacggaacaggccatctccttcgccaaagacttcttggccggaggcatcgccgccgccatctccaagacggccgtggctccgatcgagcgggtcaagctgctgctgcaggtccagcacgccagcaagcagatcgccgccgacaagcggtacaagggcatcgtggactgcattgtccgcatccccaaggagcagggcgtgctgtccttctggaggggcaaccttgccaacgtcattcgctacttccccactcaagccctcaacttcgccttcaaggataagtacaagcagatcttcctggggggcgtggacaagcacaccn

SEQ ID NO: 35707 - DNA, 408 bp, Homo sapiens
taacgatctttgctggggttttttgctttgttttgagggaaatgtcttggagtaaattttaagttcctggagttaatttgatttacaggaattttgttttttaaaaaaataggatcattctgaactttggaatgacccccttatatattttctgaaaatgaaaacagttacatgaaaaaaatttccaatgaagatgtcagcattttatgaaaaaccagaagttattagatgaaagcagcgagtgaatctttaaaacagacttgatcacgcacacacaataagtctttctctccgaaaccggaagtaaatctatatctggtagaaataatgtacccaaaagaatgtaaatttgaggatttttttgccaatagtttatagaaaatatatgaaccaaagtgatttgagttt

SEQ ID NO: 35708 - DNA, 398 bp, Homo sapiens
aagaacctcaaaatgctaaaatctagcataatgccttagatctgtttttaagtcttgtatattcctacatagctgtccgatgtattatatttgtatagtgaattgtgtacaatttttgaataagtgcatcatcacttaacctttatgttgtttgaatagtgatgatgatacatttcttcagacatttaactgtcatttttttcctttgtcatttgtgagttttatttgtacagttcctcatgaagttgcatctgagatgtgtgtatatgaaaagattatacaagggtaaaattaagcaatatattaactatggttcttcaggagaaagcttacagtgtttcaggttgtgatttattttcaaaatggagttgactctgaacatcactttgttcacctgg

SEQ ID NO: 35709 - DNA, 426 bp, Homo sapiens
cccacgcgtccgtttaaagattagggatgctgtactttttgaattgttgcagtgttggagatgccattttcacctttttaaaaagatgcattttatttgcaggtttgtgaagttcttgcaaactcttactacagaaatgttttaaatacattctcaggcatgtttgcaaaaatatggcacatgtatacattttaggaaatgttacttttgttaatctttaaaaaatacacctaatgaaagacattccactattatgcgtaatgctcagctttttgtaaagaaatatttaattgtattttgtgtttatacaggtatttcacacaataatttgttcttaatgcagccactataacttgataagtcattgccctatttaaaaagttttagtaatatcatgaatttaatttgcttaagatttagtacatt

SEQ ID NO: 35710 - DNA, 473 bp, Homo sapiens
  misc_feature (1)...(473): n = A,T,C or G
ngtcactgaactgaggtctcgcaccggccttnnngggtaganccacgcgtccgagctacttccggtaggagcctcgcacgaatggtcttcgggtagaggcaggtaaggatgtcccgggccggtggagaaggaagagctgggcgtgtggcttctcttggaatccgaatcagagcttggaccatagccttccctgagaatgctgaagcaacaccttctttggattgagtttcttccagagggaacgaggaagaggattaagtaatacgttcaattctaaaataaaacatggcccatgaaggggtgatgctcagagatgtggctatagatgtctctcaggaggaatgggaatgcctgaacccagcgcagaggaatttgtacaaggaggtgatgttggagaattatagcaacttggtgtcacttggactttctgattctaagccagccgtaatctcctcattggagcaagggaaggg

SEQ ID NO: 35711 - DNA, 420 bp, Homo sapiens
caaatacttgatacaagatttaatttcattatgcacttttcaatttcctattttggatttagttttgtcaatggtagaacaagagtgaacctgggcgccacctcgtgggggagcggaactagcataccgcctcgtcccacgggtccacttgctgttgtacccggaataagccactttttatacgtttgcagttccaacttaggcttaattgactcttatactcgaagaaaaagctcacagcttgcactttgcggcccattgacacctttgctcaagttcctctcgcatgctgaatgctcgaggtcagacttattgagttgagcgaccccgccgcctgatgcgtttccacagttataacggacctcgtgttgtgtctaaaacaaggatcatgtgtgcacaatacttgtggcccacaacatt

SEQ ID NO: 35712 - DNA, 432 bp, Homo sapiens
aagcgagcaggccatgctctccgaaagagaatacgagagacccaagcccagcaacggggtcctgaggcaccccctggagccagacagcagtgcctcctgtttccagcagctgagagtgatcccgaaggtcaccaagcacctgctctcaaaccctgtgttcacctgcatcatcctggccgcctgcatggagattgcagtggtggctggcttcgctgcctttttggggaagtacctggagcagcagtttaacctcaccacctcttctgccaaccagctgcttgggatgactgcgatcccgtgtgcttgtctgggtatcttcctgggaggtcttttggtgaagaagctcagcctgtctgccctgggggccattcggatggccatgctcgtcaacctggtgtccactgcttgctacgtctccttcctcttcctggg

SEQ ID NO: 35713 - DNA, 407 bp, Homo sapiens
gcgaatttttgtatttttagtagagatgggatttcgccatgttggccaggctggtcttgaactcctgacctcaagtgatccacctgcctcagtctcccaaagtgctgggattacaggtgtgagccactgtgcccagctaatattgattaactcaaggcctcagatcatggacacctaggtcttggggatacggctccagggtgtaagcgcccctgtggctgtccagttgggttcatgtgaccatgtggtctctgcttgagtcccctccccctccctccttccatcccctgctgtagccctgggttctggcagactttctcctgggaatagtctcccagatggacctacttgagttatttggttggcaaactttcagctagtcccctctgtgcctggtgtcttgcaag

SEQ ID NO: 35714 - DNA, 424 bp, Homo sapiens
ttctagtgctgtgttgaatagaagggtagcatgttgcctacttactgcagggacttccatattctacaaaaaacaaccaggacagcattctttttatactacacaatttgggaagatatgagcaattctttatctcgttttctaaactcaaagaatgtagccacaccaccacaggggttagtttaataataagattaaaaagtaccatacaaggaaaagcgaggcaagtactcttctggtgtatgtaaactataatttattaaactcctactacatgccagatagcatacatatactttaagtcatttcatttatttctcccagtgactctgcagataggcatatcatttgtattttacaagtgaggaaactgagttaagtaaattgttgaagatcagcagaaaaggaagaaaaaaaagggagg

SEQ ID NO: 35715 - DNA, 390 bp, Homo sapiens
  misc_feature (1)...(390): n = A,T,C or G
aattgtgaagtatctacaggctgttgacaatcagctaaagaaaaaagcaagactgtttaaagacagtaacagggccaggcgcgggggctcacgtctgtaatcccagtactttgggaggccgaggtgggcaaatcacctgaggtcaggagttcaagaccagcctaggcaacatggtgaaaccctttctctattaaaaatacaaataggccgggcttggtggctcatgcctgtaatcccagcactttgggaggccgagacaggcggatcacgaggtcaggagatcgagaccatggtgaaaccttgtctctactaaaaatacaaaaaaaattagctgggtgcggtggtgggtgcctatagtcccagctactcgggaggctgaggccggacaan

SEQ ID NO: 35716 - DNA, 411 bp, Homo sapiens
cccacgcgtacggcaggcggattgcttgggcctaggtttttcacactgtagtgtgctgcgatcacgcctgtgaatggccagtgtacttcagcctgggcaacatagcaagaccccatctcttaaaaacaaaaaaacaccacattatacgggaagtagtcccagatgagttcaagaaagatacgaagtgctgtccctgagaaagggcttcctgtattggaaacaccttgggtggttcctacagtggaaggagtggcccagcatgggaggcagaggactgacctacgagggtccaggtggccaaggaaagtggctgcccagaagccccaagagtgaggctgctgttcttggggcagccgcagagcatgatgaggattgccacgttcagtcctcagtgggcctggaggaacgtgg

SEQ ID NO: 35717 - DNA, 418 bp, Homo sapiens
  misc_feature (1)...(418): n = A,T,C or G
gtcatttctgcttgacctcctaaatgcaacaggcaaggattcactgaccttagtgtttgtggagaccaaaaagggtgcagattctctggaggatttcttataccatgaaggatacgcatgtaccagcatccatggagaccgttctcagagggatagagaagaggcccttcaccagttccgctcaggaaaaagcccaattttagtggctacagcagtagcagcaagaggactggacatttcaaatgtgaaacatgttatcaattttgacttgccaagtgatattgaagaatatgtacatcgtattggtcgtacgggacgtgtaggaaaccttggcctggcaacctcattctttaacgagaggaacataaatattactaaggatttgttggatcttcttgttgaagctaaacaagaagtn

SEQ ID NO: 35718 - DNA, 459 bp, Homo sapiens
  misc_feature (1)...(459): n = A,T,C or G
attgatcgcctgcggnaccattgatggactntccgggacgacccacgcgtncgcccacgcgtncgagtcgctccatgtagaaattaaccttatatataaatattatttttcagattaataaataatcaaataataataggggtaagcctagttagaaagtaagttttgaagttacctttttgcagtttttttggtagaataaataagtgcatcttatctctgtgccatgaacagtgagcatgtatgctcaaatgtctgttgaatgaacacagattaattaatttttgcctagaatccttctcattatctttacttcccaaaagaaacgtatgagttatgaaattgtcccatgaatatccaatttattcatgtgtactatactttttctttctttctttctttcttttttttgagactccaactcaaaaaaaagtatactcgagccttatgagattggan

SEQ ID NO: 35719 - DNA, 396 bp, Homo sapiens
agatttttaaccctctggggacgccttcacagaatatgaagctgaactctcattgtcccaggaatgagtcttcgggttcctcctttactgaaataggcatgcacctgaatgcctacttcttggaaaccagcagacgtctcgccgaccaaatcccatttataattcagaagtatctgcatcatcaccatgcctggctaagtattgtgtgtttagcaaagacaggatgctaccatgttgaccaggctggttttgaactcctgacctcaggtgatccactcgcctcggcttcccaaagtgcttggattacaggtgtaagccaccacggcccactccaagtataattggagccccagtattgattgagtccatgaagtatgtcagctggtatattttacg

SEQ ID NO: 35720 - DNA, 431 bp, Homo sapiens
cacagactcagagagaacccaccatggtgctgtctcctgccgacaagaccaacgtcaaggccgcctggggtaaggtcggcgcgcacgctggcgagtatggtgcggaggccctggagaggatgttcctgtccttccccaccaccaagacctacttcccgcacttcgacctgagccacggctctgcccaggttaagggccacggcaagaaggtggccgacgcgctgaccaacgccgtggcgcacgtggacgacatgcccaacgcgctgtccgccctgagcgacctgcacgcgcacaagcttcgggtggacccggtcaacttcaagctcctaagccactgcctgctggtgaccctggccgcccacctccccgccgagttcacccctgcggtgcacgcctccctggacaagttcctggcttctgtgagcaccgtg

SEQ ID NO: 35721 - DNA, 441 bp, Homo sapiens
  misc_feature (1)...(441): n = A,T,C or G
tgactgttgacattttcatagtgtcaagaaggaagatttgacgttgttgtcattgtccagctgggacctaatgctggcctgactggttgtcagaatggaatccatctgtctccctccccaaatggctgctttgacaaggcagacgtcgtacccagccatgtgttggggagacatcaaaaccaccctaacctcgctcgatgactgtgaactgggcatttcacgaactgttcacactgcagagactaatgttggacagacactgttgcaaaggtagggactggaggaacacagagaaatcctaaaagagatctgggcattaagtcagtggctttgcatagctttcacaagtctcctagacactccccacgggaaactcaaggaggtggtgaatttttaatcagcaatattgcctgtgcttctcttctttattgcactacgaan

SEQ ID NO: 35722 - DNA, 405 bp, Homo sapiens
cccctccgctccagtcacttgtctggagcttgaagaattgggtattccccttcccaccccaggcactggaggagcggccccccggggattccaggacctgagctccgggagctggactcgcagcgaccgcggcagagcgagcgggcgccgggaagcgaggagacgcccgcgggaggcccagctgctcggagcaactggcatggtccgagcgattgtcgtcttgtgggcgctgctgctggtggcgctaatgatgctgaccgtgggccacacacgaaccagggacagaagacctgcggcccccacccaggtgcccgggttcttgggcgactgcgtgacgctggactgctacctacaggtgcccatcatgtatgagacgcatgtgacacacctgacttgagagcggag

SEQ ID NO: 35723 - DNA, 459 bp, Homo sapiens
  misc_feature (1)...(459): n = A,T,C or G
tttcttctataaatcaaaacatctcaaaatggagacctaaaatccttaaagggacttagtctaatctcgggaggtagttttgtgcatgggtaaacaaattaagtattaactggtgttttactatccaaagaatgctaattttataaacatgatcgagttatataaggtataccataatgagtttgattttgaatttgatttgtggaaataaaggaaaagtgattctagctggggcatattgttaaagcatttttttcagagttggccaggcagtctcctactggcacattctcccattatgtagaatagaaatagtacctgtgtttgggaaagattttaaaatgagtgacagttatttggaacaaagagctaataatcaatccactgcaaattaaagaaacatgcagatgaaagttttgacacattaaaatacttctacagtgacaaagaanaatcaaa

SEQ ID NO: 35724 - DNA, 394 bp, Homo sapiens
cggacgcgtgggacactctatatagagctatgtgagtactaatcacattgaataataggtataaaattattgtatagacatctgcttcttaaacagattgtgagttctttgagaaacagcgtggattttacttatctgcgtattcacagagcttagcacagtgcctggtaatgagcaagcatacttgccattacttttccttcccactctctccaacatcacattcactttaaatttttctgtatatagaaaggaaaactagcctgggcaacatgatgaaaccccatctccactgcaaaaaaaaaaaaagggggggcccctttaaaaggacccttggggggcccaaatttaccgggggatggcaaggtaatacttttttctttaggggggggga

SEQ ID NO: 35725 - DNA, 404 bp, Homo sapiens
aaatgttagagctgttcccggagacttattgcagaaatagatgagaagcaaatcaagactactattcaaaaatcaaataccaaacagctatcatatgatgaggttgtaaatcagtctagtccaagcaactgtactgtatactgtggaggtgttacttctgggctaacagaacaactaatgcgtcagactttttcaccatttggacaaataatggaaattcgagtctttccagataaaggatattcatttgttcggttcaattcccatgaaagtgcagcacatgcaattgtttctgttaatggtactaccattgaaggtcatgttgtgaaatgctattggggcaaagaaactcttgatatgataaatcccgtgcaacagaatcaaattggatatccccaacctta

SEQ ID NO: 35726 - DNA, 389 bp, Homo sapiens
cggacgcgtgggcacgaggtcaggagatccagactatcctggctaacacggtgaaaccccgtctctactaaaaatacaaaaaaattagtcgggcgtggtggcggacgcctgtattcacagctactcgggaggttgaggcaggagaatggggtgaacccgggaggaagagcttgcagtgagccgagatcgcgccactgcactccagcctgggtgacagagccagactccatctcaaagaaaaaaaaaaaatactaagaggttctgctgccaaatgtgggttctgtgggtcgggtgtgggttctgtgggtcgggtgtgggttttgcagaccaggtgcggattctgtgtaggttctgccggcccagtgtagaggctcacacctgtaaacccg

SEQ ID NO: 35727 - DNA, 425 bp, Homo sapiens
cccacgcgtccgccccgtctctactaaaaatacaaaaattagctgggcattgtggtgcatgcctgtaatcccagctacgtaggaggctgaggcagaagaatctcttgaacccgagaggtggaggttgtggtgagctgagatcgtgccattgcacttcagctgggcaacgagagtgaaactctgtctcaaaaaaaaaaaaaaaaatgggggaaaaaaaagaaaggcagggtggaatttaattttttttttttggcaaaggcttaagggttaaaaaaaggggagccagggtcttacaaaattgttttccaggggagggggtttggagagctcccttaaaactttaaaagagaaaaattttataggggtccaaatcggtggtggcttttttctgaaccaaatttaacttttaaaaaagagaaaatggg

SEQ ID NO: 35728 - DNA, 402 bp, Homo sapiens
atacgatccatgtactgtcatgtttttcttcaggaacaagcacattatgattgacttggggactggcaacaacaacaagattaactgggccatggaggacaagcaggagatggtggacatcatcgagacggggtaccgcggggcccgcaaaggccgcggcctgggggtgtcccccaaggactactccaccatgtaccgctactgaggcgccctcagtctgcgcggataaatgtcgtggagccctttatgtatggaaacgatttaagctatttaaagcctttggaaaatacaggaagctacagggctggagcacctctgagatggaattgataacatggtcttaactcaccgaaataaacaagcacgtggtgagaggaagaaatgtgagtggacacaaagacg

SEQ ID NO: 35729 - DNA, 423 bp, Homo sapiens
  misc_feature (1)...(423): n = A,T,C or G
cccacgcgtccgcggacgcgtgggctccaagaagttcctgccaggcatggccattggctactctagctcgaagctgaccctacatgtgggtgacggttttgagttcatgaaacagaatcaggatgccttcgacgtgatcatcactgactcctcagaccccatgggccccgccgaaagtctcttcaaggagtcctattaccagctcatgaagacagccctcaaggaagatggtgtcctctgctgccagggcgagtgccagtggctgcacctggacctcatcaaggagatgcggcagttctgccagtccctgttccccgtggtggcctatgcctactgcaccatccccacctaccccagcggccagatcggcttcatgctgtgcagcaagaacccgagcacgaacttncaggagccggtgcagcn

SEQ ID NO: 35730 - DNA, 408 bp, Homo sapiens
cggacgcgtgggcgcgtccgccccgcgagcacagagcctcgcctttgccgatccgccgcccgtccacacccgccgccagctcaccatggatgatgatatcgccgcgctcgtcgtcgacaacggctccggcatgtgcaaggccggcttcgcgggcgacgatgccccccgggccgtcttcccctccatcgtggggcgccccaggcaccagggcgtgatggtgggcatgggtcagaaggattcctatgtgggcgacgaggcccagagcaagagaggcatcctcaccctgaagtaccccatcgagcacggcatcgtcaccaactgggacgacatggagaaaatctggcaccacaccttctacaatgagctgcgtgtggctcccgaggagcaccccgtgctgctgaccgaggc

SEQ ID NO: 35731 - DNA, 413 bp, Homo sapiens
accacgcgttcgtccattcgtccgcccacgcgatcttttcagaaatgggatgtgacagcattagaacttggctatcacaaacgccatttggatagaccagcgctcttaccggtctgggaaacattggacaggtacatggtaaagcataaatcgcacttgagattctgaattatttggctcctccatttctggaaattgagactcaagctttatgaatttatcaacaacttacaaatgaagaaggtcacagattgatcttttatatgaccttatttgatgctttgcgcttcaaggagatgatacctgtcatccatataagcaaactttatggcttacaactatttttttacatattacccttctagtctgtaatggaaattgtatattttgagagaagttttttatccattggc

SEQ ID NO: 35732 - DNA, 466 bp, Homo sapiens
  misc_feature (1)...(466): n = A,T,C or G
tggaggaggggctgtcaaacgattgttcatgatgttactnannancnccanantaggngagngaccggacggtgntttgcttttatcaccttctatatgggtggtttacagggcagagcaggaaggaggggaaactgggagaacggaggaggctgcattcgtggtccaaccaggagctgatggcagctggggctaggggaagggctttgagggtggaaggatgggatgggttccagaggtattcctctcttaaatgcaagggcctagattaggtagactttgcttagtattgacaactgcacatgaaagttttgcaaagggaaacaggctaaatgcaccaagaaagcttcttcagagtgaagaatcttaatgcttgtaatttaaacatttgttcctggagttttgatttggtggatgcgatggttggttttatttgtcagattgagtgggctattagacacagtag

SEQ ID NO: 35733 - DNA, 425 bp, Homo sapiens
  misc_feature (1)...(425): n = A,T,C or G
cccacgcgtccgccagcctctgccaggttcggtccgccatcctcgtcccgtcctccgccggcccctgccccgcgcccagggatcctccagctcctttcgcccgcgccctccgttcgctccggacaccatggacaagttttggtggcacgcagcctggggactctgcctcgtgccgctgagcctggcgcagatcgatttgaatataacctgccgctttgcaggtgtattccacgtggagaaaaatggtcgctacagcatctctcggacggaggccgctgacctctgcaaggctttcaatagcaccttgcccacaatggcccagatggagaaagctctgagcatcggatttgagacctgcaggtatgggttcatagaagggcacgtggtgattccccggatccaccccaactccatctgtgcagcan

SEQ ID NO: 35734 - DNA, 449 bp, Homo sapiens
  misc_feature (1)...(449): n = A,T,C or G
ctgagagcgagaggtggatcggggcggtgtgtggccagggccatgacgggcaatgccggggagtggtgcctcatggaaagcgaccccggggtcttcaccgagctcattaaaggattcggttgccgaggagcccaagtagaagaaatatggagtttagagcctgagaattttgaaaaattaaagccagttcatgggttaatttttcttttcaagtggcagccaggagaagaaccagcaggctctgtggttcaggactcccgacttgacacgatattttttgctaagcaggtaattaataatgcttgtgctactcaagccatagtgagtgtgttactgaactgtacccaccaggatgtccatttaggcgagacattatcagagtttaaagaattttcacaaagttttgatgcagctatgaaaggcttggcactgagcaattcagatgtgan

SEQ ID NO: 35735 - DNA, 389 bp, Homo sapiens
cgctcttccaggcagggtaaccagtcattctggtttgctggaaactgaggggactcaggctttactgggaaaactgggagttaccctatctccaggatacacacctggcaagtgacagtgtcttatgttcaaagtctggctgccgagcctgtgtgtggcaccaaactattgccttcaattttttgtttgctgaattaataaatgcaaatgaatgaatgaatccttccctctcactgcccttctcagtcctccttgggcaccttggctcatgtgccttggtctgagtctagactgtgccagcagcatcctgtgggaggccagatggctggttccgctgctgagttccaagaaaccccttggcccctgcttggttcagcctcagccttcag

SEQ ID NO: 35736 - DNA, 427 bp, Homo sapiens
cccttgactctgaaagatgtctgaaaggaaaatatactggggttaaattttaagctgccggttagtctgtagaatctatgttgggtttataattacagtgatagtacatacactaacaaaatcttcaaggaattctaaaagttaaattttatattctcagagggcaccctcagaaatctgttttgactactgttcaccactataaagtgtcttattttatgtgagcagagtaccacacagtataccctatcataggctcactgacttcagtgactgggtcctgctttttaaaagaaatggctgaaagttgtatcttcatgggttggcaaatgctcagcttgagaatgatcaggtgcccatgtgcatgtctaatagaaaacacctgccaacatcaagctctggaacattgatatttcctaaacgtgtg

SEQ ID NO: 35737 - DNA, 511 bp, Homo sapiens
  misc_feature (1)...(511): n = A,T,C or G
tggcgccggggnaaagaaaaactgacgacgtgngaactgaccgccatccggagncgcaccacgcgtccgcatagcaatatatttgcaacgtaccatcacttgggtcgcagtgtgagttcacactgtatccttgaagaacagaaatttccctcaagcccccaaggattctctgtgcagagtccagtcactagccctcaaagtggccattccagttggagatggcatgaacacagagagatgcagcaaaagaacattccaggaagatgtacagtatgctagtaagatcctccgtgtatcgccaagggcgctttctaataacacagtgacagtttgccactggggactcccaagtactcatatttatcacagatgttttagtcattacattgcaaatgaaattaatttccacgagaaatctatataaaagtctggggtccagtatcaatttcagcattttttcctctcaggcaaagtaaatgtgtataattttccgagatgttttccccaagag

SEQ ID NO: 35738 - DNA, 426 bp, Homo sapiens
gcgaacgcggagagcacgccatgaaggcctcgggcacgctacgagagtacaaggtagtgggtcgctgcctgcccacccccaaatgccacacgccgcccctctaccgcatgcgaatctttgcgcctaatcatgtcgtcgccaagtcccgcttctggtactttgtatctcagttaaagaagatgaagaagtcttcaggggagattgtctactgtgggcaggtgtttgagaagtcccccctgcgggtgaagaacttcgggatctggctgcgctatgactcccggagcggcacccacaacatgtaccgggaataccgggacctgaccaccgcaagcgctgtcacccagtgctaccgagacatgggtgcccggcaccgcgcccgagcccactccattcagatcatgaaggtggaggagatcgcggccagca

SEQ ID NO: 35739 - DNA, 451 bp, Homo sapiens
  misc_feature (1)...(451): n = A,T,C or G
attgagccatgagtaaccntgcggaaccgccnccggaaacccgggtcgacccacgcgtccgcctttattgtggcggagtccacccctgttgtgggctttagataaccctgtacaaaggggaatggagattgcctgtatccacctagattcataagctgccctgaggcgatcttggcatcaagaaagacagcattgaggcacatctcaccatcagcttcagaggatgtcagcctttgatatgtcccatgggttttttcccagggaaccaatctgtccttttgaagaaaagacaaagataggaacgatggtagaggaccaccggtcaaattcttaccaggattcaatgacgtttgatgatgtggctgtggagttcaccccagaggagtgggctttactggacacaactcagaaatacctctacagagatgtgatgctggagaactacatgaag

SEQ ID NO: 35740 - DNA, 512 bp, Homo sapiens
  misc_feature (1)...(512): n = A,T,C or G
tgggtgccnggggnaaagnnaaccttgacgccntcgganctgaccgacctcccgggncgacccacgcgtccgcggacgcgtgggtgcttttctgtgcctatctgctttgaccatgtgaaaaagtgatagtctgcttctctctggtaacttgtctgccacccatctgatagtaagattagccaaggccctttagccctctgtcctttctggttattgactgtccctggttcctaggaagacagagttgttctccagctaaagcgtctcctctctataaagtagttttactattcttttcatagcaggagccaaaatagtagaggaggggagagaggcacctggcactctgcgggcctgcacaggaaaaacagagccaaagacagaatcattgtataagatatttattaaaggagagcctctaagtccacatcctgagcccatgtgagtggacacaggtaggtaaaacggcgggtccagctgctgtcatctgaaagccttcaggagatgaagcn

SEQ ID NO: 35741 - DNA, 473 bp, Homo sapiens
  misc_feature (1)...(473): n = A,T,C or G
aaagaaagggaagaactgccttcttatactacagaacatgcattagtgtgggctatatagctgtggctcatgctacccaattccagatttctttgtcctctaagagttgattgctgtatattaaaattgaacatcacaggatgggaagagggctctgtaagccagaaccttactaaagtagagggcacaatcagtgtgaataaattcacttcagaatctcaagtcaaggccaggcacggcggctcacgcctgtaatcccagcactttgggaggccgagacaggcggatcacctgaggtcgggagttcgagaccagccttaccaacatggagaaaccccatctctactaaaaatacaaaattacctgggcgtggtggtgcatgcctgtaatcccatcatctactcangaggctgangcaggagaattgcttgaacccaggaggcggaggttgcagtgagccaggattgtgccan

SEQ ID NO: 35742 - DNA, 415 bp, Homo sapiens
  misc_feature (1)...(415): n = A,T,C or G
accctgcagccgcagagatgttgatgcctaagaagaaccggattgccatttatgaactcctttttaaggagggagtcatggtggccaagaaggatgtccacatgcctaagcacccggagctggcagacaagaatgtgcccaaccttcatgtcatgaaggccatgcagtctctcaagtcccgaggctacgtgaaggaacagtttgcctggagacatttctactggtaccttaccaatgagggtatccagtatctccgtgattaccttcatctgcccccggagattgtgcctgccaccctacgccgtagccgtccagagactggcaggcctcggcctaaaggtctggagggtgagcgacctgcgagactcacaagaggggaagctgacagagatacctacagacggagtgctgtgcn

SEQ ID NO: 35743 - DNA, 201 bp, Homo sapiens
cgctgagtgcgtttcttttatttggaagcagaggttccccctgattctgatgataataaaacaaagaaactgtgaaaaaaaaaaaaacaggccgcccattgtaaagaatcccttggggggcccaattttacgagggcttgcagacacatacctctctccttatggggggctgataaaaccactccttgagggttttggaag

SEQ ID NO: 35744 - DNA, 431 bp, Homo sapiens
gcgcacaggtgtcgtgaaaactacccctaaaagccaaaatgggaaaggaaaagactcatatcaacattgtcgtcattggacacgtagattcgggcaagtccaccactactggccatctgatctataaatgcgggggcatcgacaaaagaaccattgaaaaatttgagaaggaggctgctgagatgggaaagggctccttcaagtatgcctgggtcttggataaactgaaagctgagcgtgaacgtggtatcaccattgatatctccttgtggaaatttgagaccagcacgtactatgtgactatcattgatgccccaggacacagagactttatcaaaaacatgattacagggacatctcaggctgactgtgctgacctgattgttgctgctggtgttggtgaatttgaagctggtatctccaagaatggg

SEQ ID NO: 35745 - DNA, 382 bp, Homo sapiens
ataactttgtaacttcacttcagcctcccattgatcgctttctgcaaccattcagactgatctcgggctcctatttcatttacattgtgtgcacaccaagtaaccagtgggaaaactttagagggtacttaaaccccagaaaattctgaaaccgggctcttgagccgctatcctcgggcctgctcccaccctgtggagtgcactttcgttttcaataaatctctgcttttgttgcttcattctttccttgctttgtttgtgagtttgtccagttctttgttcaacacgccaagaacctggacactcttcactggtaacatattttggcaagccaaccaggagaaaagaatttctgcttggacactgcatagctgctgggaaa

SEQ ID NO: 35746 - DNA, 425 bp, Homo sapiens
  misc_feature (1)...(425): n = A,T,C or G
ccgcgtccttggctggcgtaaaaatggctacaaacttcctagcacatgagaagatctggttcgacaagttcaaatatgacgacgcagaaaggagattctacgagcagatgaacgggcctgtggcaggtgcctcccgccaggagaacggcgccagcgtgatcctccgtgacattgcgagagccagagagaacatccagaaatccctggctggaagctcaggccccggggcctccagcggcaccagcggagaccacggtgagctcgtcgtccggattgccagtctggaagtggagaaccagagtctgcgtggcgtggtacaggagctgcagcaggccatctccaagctggaggcccggctgaacgtgctggagaagagctcgcctgggcaccgggccacggccccacagacccagcacgtatctccn

SEQ ID NO: 35747 - DNA, 412 bp, Homo sapiens
tgaacggatgccacactgtgctggggccccttgacctcagcagagccgcttcctggtgctacgcagcctccacactcagagcccgtggactgggctggcctaagggccagggctgatggtactgctggcccaacactgctctctttgagtttggtttttttaggtttgttttattttggttttttccaattctttacttttgatactgtgaagatctttcgtgccgaaagataaagcaacatttggacacagaaaagaaaaaaaaaaaaaaaaaaaaggggggggccgtttaaaagaaccccttggggggccaaagttaacccgggaaggcaaaaaaaaaatttttcccctaaagggaggcgtataaaaccctagctgggaatttttggaaaaaaaccttactttggggggg

SEQ ID NO: 35748 - DNA, 429 bp, Homo sapiens
agccatggtggtcctggccttctttgtggtacaaatcaacaaggccaagagcaggccgaagcggaggaagcccagggtgaagcgcccgcagctcatgcagcaggttcacccgccaaagaccccttcggtgtgaccggcagcctggctgaccgtgagggccagagagagccttcacggacggcgctggtgggtgagccgagctgtggtggcggctggtttaaaagggatccagtttccagctgcaggtttgttagagtctgttctacatgggcctgccctcctgtgatgggcagaggctcctggtacatcgagaagattcctgtggatcccgtcaggagggacttagtggctctgccgccagtgagacttcccgccggcagctgtgcgcaccaaagactcgggagaactggaaaggctgtcttgggtctt

SEQ ID NO: 35749 - DNA, 337 bp, Homo sapiens
  misc_feature (1)...(337): n = A,T,C or G
cccacgcgtncgggaacgaggcaaggagctaaagcagcgtgcgttcagccctggggcattttattaatgcttttacgagttagaagagttgggataatttgccatctggagtttctctgccttgctgatctgagctcagacctgccaatttaccagagataattgataacaccctgtaacagctgaatagccagttattgaatacttcatcctttggtctgacgttgactttttggttttgccatcaagtaaccatccacagtgcccgtacatagcaggcactcaataaatgtttgaataaatgaatttgagtatttaaaaaaaaaaaaaaaaaagg

SEQ ID NO: 35750 - DNA, 399 bp, Homo sapiens
  misc_feature (1)...(399): n = A,T,C or G
cccggaagcagatcgcgctggggaaaggccacgtcgctatgagtgtgtttcagtctacctggattaaacgtttgcttctcttcgtctaccttgattaaacgtgcacttcgcagtcctcggttctccatacccgtgacctggggatcgctacggaccttaaaatacccgcaacagccccttcgtcccaagctggagagcagtggcatgatctcggctcactgcagcttctacttcctggcctcaagcagtctttccacctcagcctctcaacgcactggaattacagatgtgagccaccacactaggcctacaagtggtccttacaccagattaatttatcttgaaatggcgggcaactgaatcgcacacctcaatctatgatttgacttttaaagaatn

SEQ ID NO: 35751 - DNA, 418 bp, Homo sapiens
aacaagaggttctataccttttaatgaattgactttcataaattggttatgttggtgggcaagttctttaagctggaaattgtaaattcctcctgaaatgttttttcatgcagttaccatgaactaatactacaataaaggatggtcttgggtgtcaaaaaaaaaaaaaaaaaaaaaaaaaaaaaaaaaaaaaaaaaaaaaaaaaaaaaaaaaaaaaaaaaaaaaaaaaaaaaaaaaaataaaaaaagggggggggggtgtttttattattatctgggggggcccccaaaagaggggggggggggggggtttttttttttttttaaaggggaaaaataaaaaaaaacttgttttttttataaaaaaaaatattttttttgggggggagaaaaaaaaaaaaaccccctccttttttttt

SEQ ID NO: 35752 - DNA, 444 bp, Homo sapiens
ttgagacgcatgcgttcgctaaccgatgcacaatatatattcttttcatcagcacatggaatatcctccaggatagaccatacgttagaccacagaacaagtctcaacaaacttagaagatcaaaatcataccaggtatcttctcagatcacaatggagtaaaattagaagtctgtaccaagaagaactctgtaaactatacaaatgcataatttctactatttaaatatgtatactatacaaatatatacaactatgtatatacaaatttgcaacatggaaattaaacatgcttctgaattaatattgagtcaacgaagaaattaagatggaaataataaagtattgaaacaaacgaagataaaagcacaatataccaaaacctgtgggatacagcaaaaacagggctaaggggaattttatagcaataaatgcctacagcaa

SEQ ID NO: 35753 - DNA, 399 bp, Homo sapiens
  misc_feature (1)...(399): n = A,T,C or G
aggacgcgtgggtgactcggaggtttattttttctttgtggtcttttttgttccagtttattttaaatgcatattttatttgaattgcttatttaaaaagccccctctggcctcctgattccagctagagtcaacagtgggatacctgcgcttgaaggacatcatccaccgcgacattaaggatgagaacatcgtgatcgcccatgacttaacaatcaagctgattaactttggctcggccgcctacttggaaaggggaaaattattttatactttttgtgggaccatcgagtactgggcaccggaagttttcatggggaatccctacacagggccggagctggagatgtggtctctgggagtcactctgtacacgctggtctttgaggataacccctn

SEQ ID NO: 35754 - DNA, 516 bp, Homo sapiens
  misc_feature (1)...(516): n = A,T,C or G
cttagtcgaccgtcgtaccgannccgacattcccggtcgacccacgcgtccgctttgactataatgtgggagccaatttttgcctcagtcttcatttttatatttaccttgttattctcaggcatttttttcttctatgtgagagttaaaatcattctgtaatttccccccaaaatcatattggtattctagttggcaatgtcttacatttatgttaagtttgagggaattggtagttcaagtataagttaattaaggccattttatttctaagtgaacagacttgaaactccagagctactgaagtaaaagttagaatcatttgcattttcattcagataggagataattttgtaaattttgatgctattattttaactctattagcttaagtaatgtcataatagaaaacacaagcatttgaccaaatgagatccattcagcgactaactggcaaggcactcaaaacatgtcattcattaaatggtgttttatttacctcaaaaaaaaaaaaag

SEQ ID NO: 35755 - DNA, 481 bp, Homo sapiens
  misc_feature (1)...(481): n = A,T,C or G
cggggtannnnaattgaacgcccattgatccgccctcggaanncccgggncgacccacgcgtgcgaagggatgaacagatgattcctcttcctggtacatccttgagaccatgtgtgttaaatcttgtaatcgtaggtgtgattataatcaggggcactttaatgagaagtggagataaccacaaagctttcaatctggaatttctctttatggctctgttttgcccccaggaacagctgaagtgaaaatgccacactgttgatgaagttctgtgtttttcccccttctaatcaccatctcccaagctatagagtgccaaaagataataccaggtttcagtgaattctctgttgcttgtggatgcgtcagccaagggcctctgtggttgtggcagctggaaaaggaggtaggggttcaggagatagcatgggatcagagaggggaaacatcaacgcccctaactcatgaggcagtttttac

SEQ ID NO: 35756 - DNA, 423 bp, Homo sapiens
tcaagagaggaattacgcacaacttgacagtctaatatataactattgcattaaaggttgactctttggtaaaaaagaaaaaggaaggtttgaaaactggtcagtggataattgttaaagaggtagtcttcgggtatagtggcaacttggtagagtagaaagggcactgaactaggaatttagcaacctatgttttagttctaattctgccactagatagctgattgagctctttggactttagtgtcttaattttataaagtaaaggaaaggccgggcacagtggctcatgcctgtaatcccagcactttgggaggccgaagcgggtggatcgtgaggtcaggagttcgagaccagcctggccaagatggtgaaaccccgtctctattaaaaatacaacaatcagccaggcatggtggcacc

SEQ ID NO: 35757 - DNA, 495 bp, Homo sapiens
  misc_feature (1)...(495): n = A,T,C or G
cggctgccactgatactgacggacctgcgcacggaaccccgggtcgacccacgcgtccgtgcatcttttcccaccctgtcactcaacgtggtccctagaacaagaggcttaaaaccgggctttcacccaacctgctccctctgatcctccatcagggccagatcttccacgtctccatctcagtacacaatcatttaatatttccctgtcttacccctattcaagcaattagaggccagaaaatgggcaaattatcactaacaggtctttgactcaggttccagtagttcattctaatgcctagattcttttgtggttgttgctggcccaatgagtccctagtcacatcccctgccagagggagttcttcttttgtgagagacactgtaaacgacacaagagaacaagaataaaacaatatctgtgaanaaaaaaaaaataaaaaaaaaaaaaaattttaannataaatttaanaaaaaaattcctatctcttca

SEQ ID NO: 35758 - DNA, 459 bp, Homo sapiens
agaatataaatttgcccctgacaaatgcacacacctcatgctatcctcacgaaactggaataagccttcgaaaagaaattgaccttgaagcttgtatttgatatcagcactggattgtagaacttgttgctgattttgaccttgtattcaagttaactgttccccttggtatttgtttaataccctgtacatatctttgagttcaacctttagtacgtgtggcttggtcacttcgtggctgaggtaagaacgtgcttgcggaagacaagtctgcggcttggcgagtctagtgtggccagcagcctctgatctgtgcagggtattaacatgtcagggctgacagttctgggatctctctataggctgtcaagaaccagatcgttttgtcttgcgggtctgcagggctggaagaacaagcacgaagacccaattgcctttcttaactgatgtttctggggc

SEQ ID NO: 35759 - DNA, 432 bp, Homo sapiens
gaacctcttgattttggcggtactcagaaacagaaacaacttttcattggtggagaagcttgtctatggggagaatatgtggatgcaactaacctcactccaagattatggcctcgggcaagtgctgttggtgagagactctggagttccaaagatgtcagagatatggatgacgcctatgacagactgacaaggcaccgctgcaggatggtcgaacgtggaatagctgcacaacctctttatgctggatattgtaaccatgagaacatgtaaaaaatggaggggaaaaaggccacagcaatctgtactacaatcaactttattttgaaatcatgtaaaataagatattagactgttttttgaataaaatatttttattgattgaaaaaaaaaaaaaaaaaaaaagggggggccgttttaaaggacccctgg

SEQ ID NO: 35760 - DNA, 427 bp, Homo sapiens
  misc_feature (1)...(427): n = A,T,C or G
aaaaacaagaagaaaaaatccccagtacccgtagaaacccttaaagatgttaaaaaagagttaacgtatcagaacacagatttaagtgaaattaaggaagaagagcaggtaaagtctactgacagaaagtcagcagtggaagcccaaaacgaggtgactgaaaatccaaaacagaaaattgcagcagaaagcagtgaaaatgttgattgtccggagaatcctaaaattaagttggatggaaaacttgaccaagaaggtgatgatgtacaaacagcagctgaggaggtactagctgatggagacacattagattttgaggatgacaccgttcaatcatcangcccgagggctggtggtgaagaattagatgaaggtgttgcaaaagataatgctaaaatagatggtgccactcaaagcagtcctgcag

SEQ ID NO: 35761 - DNA, 415 bp, Homo sapiens
cccacgcgttcgcggacgcgtggggcactgaggaacgtctgtaaatatgattttataattccatgtatagttggtgtacactcaaaacctgtccccggcagccagtgctctctgtatagggccataatggaattctgaagaaatcttggggagggaaggggagttggaacaaatgtctgttccctggaggccagtccagtgctcatacctttagactcattgtaagatgccactgccaacatgagaccaaagtgtgtgactagtcaatgaagtgcgacagcattaaagactgatgctaaacctcaaaaaaaaaaaaaaggggggggcgttataaggactccctgaggggcccaaactttacgcgtgcttgaaaggttttatttttctccttatagggaggggaattataacctac

SEQ ID NO: 35762 - DNA, 380 bp, Homo sapiens
  misc_feature (1)...(380): n = A,T,C or G
cccacgcgtncgcaagcgctgaaaatgcacccgaatctggtacctatgatgagtacatgaatagtgatgaatagccctttgtgctgtgtgctatatacaaccatttgcattcagaaagcagcatttgaagctgagttccattactggtgattgaagtattttcaggagcagatacatgtggtgcatgttatatgcacttagtttgaaagtatccctcacccacaaagtgcagaacctctgaaaggtgagccgtggtgcaggtgcccccctcgctgttcgggtcagttcttggccatgcttggcctgtcacacgccgggtctcaacaacatcgtgcgaggagacagtgactggtttcagcccaagagtcaactgttgagct

SEQ ID NO: 35763 - DNA, 422 bp, Homo sapiens
aagaacgtgcttcttaggtcataacgcttttgcagggtcaatggtgttgagccgctcatagcatgtgacctacctaccccatcagaaataactttttatcttgctcaagttctggtcaactagtagcctgacggcttagaactttgactatttaaaagtttcattttcttttgcaattttagttttatgtactgttaaagaattgtactgaattctttttagatcacagtaaaaataggttggcagagatttcagtttcccagggcttaaccagaaccgccacctcaatgcattgtcagtagaatacattattagaaactgttaaggtctttcccgggacatttttttctgccattttcttttgcaattgtagttttatgtactgttaaagaattgtattgaattctttttagatcaaagta

SEQ ID NO: 35764 - DNA, 562 bp, Homo sapiens
ctgtctgatcgcaacttggcgtacgttcgatctactttgtgtttatttctagttgtccctaccttcagggtcggaaaaaagttgaagcgcgttgagtccgtaatcaccggccgacccacgcgtccgagtttggacagtagatggacttctcagaactttgcaaacataatcattggtctcaccctcttttaaaaaaaaaaatcggtcttcaaagagctgttgatgaaattgctatgttaaaattccattatcgggagttccttatttatcactagcagagagtatgatacaattttcaaatgtgaacaatcttaaatttagcttgtctttctgctaagctgttaaatgtatttatagtaaaggaagaaaaaaagactgtcatttccttataagtttgggtaacatcctcctctggataacttgactgtaatttaacatctttttcttttgcacatcttcctgagttgaatgtccacgtggaatggggtcatgaattataaaagaccctgataaaagttttgtttactggggtgaacatctttccagtaaccaggtagtcctg

SEQ ID NO: 35765 - DNA, 476 bp, Homo sapiens
  misc_feature (1)...(476): n = A,T,C or G
atagaacgccctcgatagagcccgtaagnaccggcncgacccacgcgtncgcggacgcgtgggcggacgcgtgggggcctatgacatatcagagggccttatctaccttcacttcaaaggcatttttcatcgggacctcacatctaagaactgcctgataaagagggatgagaatggttactctgcagtggtagctgactttggcctggctgagaagatccccgatgtcagcatggggagtgagaagctggccgtggtgggttccccattctggatggcacctgaggttctccgagatgagccctataatgaaaaggcagatgtgttctcttatggtatcatcctctgcgagatcatcgcccgcatccaggccgatccggactatcttccccgcacagagaatttcgggctggactatgatgctttccagcacatggtgggagactgtcccccaaaatttcttgcacttacttttn

SEQ ID NO: 35766 - DNA, 425 bp, Homo sapiens
taagttatttgacgttggtaactgacaaagtgaaaaagcactttcagaaggttatgagacaagaagacattagtgagatatggtttgaatatgaaggcacaccactgaaatggcattatccaattggtttgctatttgatcttcttgcatcaagttcagctcttccttggaacatcacagtacattttaagagttttccagaaaaagaccttctgcactgtccatctaaggatgcaattgaagctcattttatgtcatgtatgaaagaagctgatgctttaaaacataaaagtcaagtaatcaatgaaatgcagaaaaaagatcacacgcaactctggatgggattgcaaaatgacagatttgaccagttttgggccatcaatcggaaactcatggaatatcctgcagaagaaaatggatttcgt

SEQ ID NO: 35767 - DNA, 482 bp, Homo sapiens
  misc_feature (1)...(482): n = A,T,C or G
agaaaccactcatggttagctacccacctttgattttagaggtggagatttatacattcagttaactacagctattcaaaagctcaggaattttctacttaaagagatgttattggggaacaaatgggcagaaaaaaaattcctttagcttatattatataatgagaatggctttccttttaaaactgcttcacctgaagtgaattctggataacatacattcatggtatccaagtgtatagntttcccttcttgcttattgatccagtgctttcttgagtttcttatgctggtaatttcccagttgatattgggggaagaacagcaaggcagaggaggaagcaaaatgcagtgattcgtgccaagacaaatcgttcccagcttgtctgctacaaggagggaagtagttattgtctggtaagatgcatttggagttccttttgtaggattgagggagttaagtgatgcgacatagcacaacg

SEQ ID NO: 35768 - DNA, 484 bp, Homo sapiens
  misc_feature (1)...(484): n = A,T,C or G
cgatcacggcccggcgcgtggctcgggctcgggcggagctggagacgtgtggagctgttcgaggactcgcgggtgtgcagtgcacctatgatatgtgttttagaaatagccgttaaactttggtttgaatgaagaatgtctctcaatccacctatatttctcaaacgaagtgaagaaaatagttcaaaatttgtggaaacaaaacagtcacaaactacttccatagcttcagaagatccccttcaaaacttatgtttagcatctcaagaagttcttcaaaaagctcagcacagtgggagatcaaaatgtctcaaatgtggtggttccagaatgttctactgctatacatggtatgttccagttgaaaatgtacctattgaacagattccacttgtgaagcttccattgaagattgacatcattaaacatccaaatgaaacagatggcagaagtactgctatacatgcnaaactcttagcacctg

SEQ ID NO: 35769 - DNA, 412 bp, Homo sapiens
tcgcagatcctgggccgcaggtggcacgcgctgtcgcgagaagagcaggccaagtactatgagctggcccgcaaggagaggcagctgcacatgcagctatacccaggctggtcagcgcgggacaactacgggaagaagaagaggcggtcgagggaaaagcaccaagaatccaccacagataactctcttcactattcctaggaggaaaaagaaatgcattcggtacttacccggagaaggccgctgccccagccccgttccttccgatgacagtgctctaggctgccccgggtccccagctccccaggactcaccctcataccatctgctgccccgcttccccacagaactgcttactagccctgcggagccggcacctacatccccaggtctctccactgctctcagcctg

SEQ ID NO: 35770 - DNA, 407 bp, Homo sapiens
cgccatttttttggaaacctctgcgccatgagagccaagtggaggaagaagcgaatgcgcaggctgaagcgcaaaagaagaaagatgaggcagaggtccaagtaaaccgctagcttgttgcaccgtggaggccacaggagcagaaacatggaatgccagacgctggggatgctggtacaagttgtgggactgcatgctactgtctagagcttgtctcaatggatctagaacttcatcgccctctgatcgccgatcacctctgagacccaccttgctcataaacaaaatgcccatgttggtcctctgccctggacctgtgacattctggactatttctgtgtttatttgtggccgagtgtaacaaccatataataaatcacctcttccgctgttttagctgaaaaatt

SEQ ID NO: 35771 - DNA, 469 bp, Homo sapiens
acttatttagtatttcatttaactttattgtggcttttacatagaaacatattcagttgtacttgttttaaattgtatacaagctgtacataaaattagccaaatgaatcatttcttatatcttattcatgaaagtttgcatacagatgtttgcatatatgcctttttgaatttttgctggttaacctttatcatttatctttgtaatgtgaacatgcttcagagtgtaccttttgccataacctattttaatttactttttctgaagtttggagtgataatttttagtggaagcaatttgtaatttaagttggtagttatattatatatagaaaagattttttagttaaacttctggacatgagcgtcctgtttaaatttcttggtaatatcgtgccaagcctcaaaaataggcttattccatggaacaagaattagaaatgaataagctatcaatatataaattaag

SEQ ID NO: 35772 - DNA, 459 bp, Homo sapiens
cagaagaaaagcagaagcgaagctcagatctgctgggaggagactacattttgtcccctcctggggtcttgcacagtggcaggtgacattcgtgttacaggaatgactgccagggcctgggcctcgtggcggtcttcagctctgctcctcctgcttgtcccaggctattttcctctgagccaccccatgaccgtggcgggccccgtggggggatccctgagtgtgcagtgtcgctatgagaaggaacacaggaccctcaacaaattctggtgcagaccaccacagattctccgatgtgacaagattgtggagaccaaagggtcagcagggaaaaggaatggccgagtgtccatcagggacagtcctgcaaacctcagcttcacagtgaccctggagaatctcacagaggaggacgcaggcacctactggtgtgagtggatacaccgggctcgagatttc

SEQ ID NO: 35773 - DNA, 398 bp, Homo sapiens
agctcttacgtaaggcatgttttattggggagggctgagcttttattttctcctctccagtggggttggcttttattgtttcttgtttgggtttggaatggaaatatggatagcagcataaagtacttttattttgacaaaattcatttttttcaacaatggagacatagatttgacccacaataacttctccccctctctttttactctgctcaaaaagcatctctcctcccattacccaaccttggacataagtgcgcctggctggcttgcacatatttgttctgctttgtaaaaattggccattagtgcatttattgagatgatctctaaagagctatgccctgacctacccctgattctatgacattggggcccttcttttgctgaaacttgct

SEQ ID NO: 35774 - DNA, 429 bp, Homo sapiens
cgccctgctctggggagcgtctggcgcgatctctgcctgcttactcgggaaatttgcttttgccaaacccgctttttcggggatcccgcgcccccctcctcacttgcgctgctctcggagccccagccggctccgcccgcttcggcggtttggatatttattgacctcgtcctccgactcgctgacaggctacaggacccccaacaaccccaatccacgttttggatgcactgagaccccgacattcctcggtatttattgtctgtccccacctaggacccccacccccgaccctcgcgaataaaaggccctccatctgcccaaaaaaaaaaaaaaaaagggggggccgttaaaaagaatccttgggggggccaaggttaacgcgggcaggcaaggtaatagttttttccttatagggagcgtataaac

SEQ ID NO: 35775 - DNA, 405 bp, Homo sapiens
cccacacactgagaagtaactcggagctacagtctgttaaaaatgaaaaggttgaggccgggtgcattggttcatgcctataatcccagcgctttgggaggtcgaggcaggcagatcacctgaggtcaggagtttgaaaccagcctggccaacatggcgaaaccctgtctgtactaaaaatacaaaaattagccagatatgatggcaggcgcctgtaatcccagctacttggaaggctgaggtatgagaatcgcttgaacctgggagatggaggctgcagtaagccaagattgtaccactgcactccagcctgggcaacagagtgagactctgtctcaaaaaaaaaaaaaaaaggagaaaaagaaaaaagttgcccctgaaagggggggagagtagttcctgaac

SEQ ID NO: 35776 - DNA, 433 bp, Homo sapiens
aaagttctcaggtctttatttgctctctcaacttccaggaattgacttatttaattaatccatcaacccttcatagcaaatatttgagaaaacaaatttatattcaggttcctaacttcattagggaagtaagaagttgcagctcagcgcaccatgaagttgagacagagatggagacatccagcccacttctctggaacaggaaagatgatcggggagggaacacaggtcagtgtggggacaggggtcacggtggacacgggggtgggctgtctgtccacctcctcacattatgctaacaggaacgcagacacattcagatgcctttgcagaaagagatgccagaggctcttgaagtcacaaaggagaggtgtgaagaaatcctgcatctcagtcccacacaggcagctgtctcaggctttacaagcgatga

SEQ ID NO: 35777 - DNA, 476 bp, Homo sapiens
  misc_feature (1)...(476): n = A,T,C or G
aataaataccagacacgtacaaaatccagctatgaatatagagggcttatgattcagattgttatctatcaactataagcccactgttaatattctattaactttaattctctttcaaagctaaattccacactaccacattaaaaaaattagaaagtagccacgtatggtggctcatgtctatagtcccagcactttgggaggttgaggtgggaggattgcttgaacccgagaggtcaaggctgcagtgagccatgttcacgccgctgcactcaggcttgggtgacggagcaagaccccgtctcaaaaaaaattttttttttaataaaacaaaatttgtttgaaaacttttaaaaattcaaatgatttttacaagttttaaataagctctccccaaacttgctntatgccttcttattgcttttatgatatatatatgctnggctaactatatttgctttttgctaacaatgctg

SEQ ID NO: 35778 - DNA, 435 bp, Homo sapiens
atatgtactgctgggtacatggacagtaagtgtgttttcagatggagtaccagcaccgaaaatgggttgagggaggatgggttgtatgtatgtttctgcccacaaattttgagcagccatattatgaattagatcgtcacagccaagtaataacccacgaatggtatgagtttcatgtgtaatagctcaaatggaataaacatgaatgctggagtggaccattatcctcaaatattctatgtcacttctcatttaaagactcttgctatgaactattaaaaactttaggcaaaatcaaaagtatttgcggcaaaataaaggcctattctactcttatttaaagtgaaacactgtatacttgtttctctccaaagcgaaattaagtatttataatttcaattgcctcgataagtttccaagtcactgaaatctgct

SEQ ID NO: 35779 - DNA, 420 bp, Homo sapiens
  misc_feature (1)...(420): n = A,T,C or G
cgctcccccctccccccgagcgccgatccggctgcaccgcgctcgctccgagtttcaggctcgtgctaagctagcgccgtcgtcgtctcccttcagtcgccatcatgattatctaccgggacctcatcagccacgatgagatgttctccgacatctacaagatccgggagatcgcggacgggttgtgcctggaggtggaggggaagatggtcagtaggacagaaggtaacattgatgactcgctcattggtggaaatgcctccgctgaaggccccgagggcgaaggtaccgaaagcacagtaatcactggggtcgatattgtcatgaaccatcacctgcaggaaacaagtttcacaaaagaagcctacaagaagtacatcatagattacatgaaatcaatcaaagggaaacttgaagaan

SEQ ID NO: 35780 - DNA, 473 bp, Homo sapiens
  misc_feature (1)...(473): n = A,T,C or G
aggtagcannannnnnnaaactggggtcantangatctnccanancnccggncgacccacgcgtncggttttgcacctgagacagatagcctcactcgcctcaccctagtcctggtggcatttgtctcaggtgcaggatttaagaaagaaaccttggagtgctcaccctgtggctgggtaaatggtcctaaagtggtggttttcaagcctgagtgtgtatcaggatcatcaggggagcttgctaaagagcagttcctgcggtcagaccctcatgcattttgagcaggtgtggggactgggaaactgcatctgtaacctgctgtaatctaacgcttatctaaatactactgtgctcacacagagaacaccgcaaaagtagaggtgttcctccagagggcaggtgagcagatggcacagtctgcttggaattcagtcaggtgatgagagatgagatgaggcactcctagctttgg

SEQ ID NO: 35781 - DNA, 472 bp, Homo sapiens
  misc_feature (1)...(472): n = A,T,C or G
cccacgcgtccgcagaagtttgctcaggagtaagcccctacttcttagtttctttatgcttgatacatccagcaatggagtaccaaagaaaataatgacatgaagcatgtatctagcttaattaaagactactggccgaagaagataaaagccagtaataacagttctcatatcacagtaaatgaatatatatttaaaagatatttattaaatgcgtttctcactcaaggcaggctttttgttgttgttgttaaaaaggaaggaacaatcatttgagcccagaggtttgagaccagcctgggcaacgtggagaaacctcatctctacaaaaaaaacattaaaaattagctaggcatggtggcgcgcctatagtcccagctactcaggaagattgctntagcctggagggttgcagtgggccaagagtgcaccactacattccagcctgggtgacacagtgagactctctctt

SEQ ID NO: 35782 - DNA, 437 bp, Homo sapiens
  misc_feature (1)...(437): n = A,T,C or G
gagggctcactgagaaccatcccggttacccgatcaccgctggtcaccatgaaccacattgcgcacaccttctctcctgtcaacagcggccagcctcccaactacgagatgctcaaggaggagcaggaagtggctatgctgggggtgccccacaaccctgctcccccgatgtccaccgtgatccacattcgcagcgagacctccgtgcctgaccatgtggtctggtccctgttcaacaccctcttcatgaacacatgctggctgggcttcatagcattcgcgtactccgtgaaggctagggacaggaagatggttggcgacgtgaccggggcccaggcctatgcctccaccgccaagtgcctgaacatctgggccctgattntgggcatcttcatgaccattctgcttcatatcatcccagggttggtcgtccacgg

SEQ ID NO: 35783 - DNA, 417 bp, Homo sapiens
  misc_feature (1)...(417): n = A,T,C or G
gaattaagatggagttgcagcagaaggaccgggcactggtggagctgctgcgagagaaggtcgggctgtttgctgagatgacccatttccaggccgaagaggatggtggcagtgggatggccctgcccaccctgcccaggggccttttccgctctgagtcccttgagtcccctcgtggcgagcggctgctgcaggatgccatccgtgaggtggagggtctgaaagacctgctggtggggccaggagtggaactgctcttgacaccccgagagccagccctgcccttggaaccagacagcggtggtaacacgagtcctggggtcactgccaatggtgaggccagaaccttcaatggctccattgaactctgcagagctgactcagactctagccagagggatcgaaatggaaatcacn

SEQ ID NO: 35784 - DNA, 412 bp, Homo sapiens
  misc_feature (1)...(412): n = A,T,C or G
ttaatgtaaatgtaggattaaggattatatttttgactttgagaaacatgcattctggctcctaattcagaaagatttccacaggtataattgaatagtcacaagtcagactatcttttcttgactgtaaaacagtacaagcggaatgtggtaataaatatctgacacttaattttcagcaacataatgcaagtaggagatgtgagtactaatgcatcaaaagcaacaaatccttttagaaatctgtttacaaagcagatcagagatatcatcggttattgaaaaaagtgggtagagagtggactctcatgttccatattttccctttaactgagtcataaattatcttccatgctgactacagtgcttatttagtgcttactatacaaccatgaaaatntgttcatgcctc

SEQ ID NO: 35785 - DNA, 513 bp, Homo sapiens
  misc_feature (1)...(513): n = A,T,C or G
ggtcctcnaaggtgtgccagggttaccnncaactgaatntcatgatgccctcggaccggccggaatcccggtcgacccacgcgtccgtgaaanataaatctaagaacagatacatcaagattctgctgtgtcatttaattctgaaactcccagtattctacccttcttcatcactgcatattaccccactcttccatcccaaattggctatcctttcagcccaccaacttagcggcagcactagggattcattataaggcaaatctggtttacataaagacctgaaggaggcctgtatttgaagctcacacttggtattggtatctctcatttttactgagccagcgtggaataccactgtatgtactcatataagcccttgacttttactgctcatcaggattggaatattactctagcagtcttcacacataggcgagttacagtccttttaacaagcatctcatttccctataatggaacctaatagccaactttttcatagaaattgct

SEQ ID NO: 35786 - DNA, 433 bp, Homo sapiens
cctttcttaattgacagtgacattatatctgcaaaataggcttcatacctactgtgttagttttagtttcctaggcctgctgtaacaaagcaccacaaattgggtagcttagaataacagaaattgtttgatagttataaataaaggtcagatgtctaaaaccaaagtgttggcagggccgtccctctgaaggcactgaaaaaaaaatttccagtccttctaatttcttgtggttccttaacttgtggcagcataactccagtcttcacatgaagttcttcctgtgtgtgtatctgagtcctaatataaggagactagtcatattggattggggtccatcctgctctgttaatgacctcatcttagctgctgacatctgtaatgactctattaccaaataaggtcacagtatgaggtagtaggggctaggact

SEQ ID NO: 35787 - DNA, 432 bp, Homo sapiens
gaacgcggagagcacgccatgaaggcctcgggcacgctacgagagtacaaggtagtgggtcgctgcctgcccacccccaaatgccacacgccgcccctctaccgcatgcgaatctttgcgcctaatcatgtcgtcgccaagtcccgcttctggtactttgtatctcagttaaagaagatgaagaagtcttcaggggagattgtctactgtgggcaggcgtttgagaagacccccctgcgggcgaagaacttcgggatctggctgcgctatgactcccggagcggcacccacaacatgtaccgggaataccgggacctgaccaccgcaggcgctgtcacccagtgctaccgagacatgggtgcccgggaccgcgcccgagcccactccattcagatcatgaaggtggaggagatcgctgacatcaagtgccgc

SEQ ID NO: 35788 - DNA, 218 bp, Homo sapiens
  misc_feature (1)...(218): n = A,T,C or G
agatactgaatgatgacgaacatcacagtacattggtatctacaagacattatagagcacctgaagttattttagccctagggtggtcccaaccatgtgatgtctggagcataggatgcattcttattgaatactatcttgggtttacccgaatntcacacacgatagtaaggagcatttagcaatgatggaaaggattcttggacctctaccaaaac

SEQ ID NO: 35789 - DNA, 414 bp, Homo sapiens
catttatgcagggtgatagcactttcagataagaattgcatgacaccccacaacctgggaattgtgtttggaccaaccctgtttcggccagagcaggagacatctgacccagcagcccatgctctctacccagggcagctggtccagctgatgctcaccaacttcaccagcctcttcccctgatgcagggaaggaagaagagaaaacatatttccggtcatctctggtggtgagaggctggtgttctgttttgaggatatccctttaaatctcccaaatgactgtctctatcttcatgagtgtgacttgaggtgttgggatgggtgagggagcttctctaaagaggaaagtgagtggattaacccctgcttctcttcttggtccctggtatcattccctcccaacataataata

SEQ ID NO: 35790 - DNA, 411 bp, Homo sapiens
atatatatacacacacacacgtatatatttctgacaaagtgaatacaagtgaaataaatatgtgtatatatgtgtgtgtgtgtgtgtacatatatagatattttagatatatagacatatctatatatctagatctagatctatatatagatttttttttttctgatacagggtctcactctgctgcccaggctgaagtgcaggggcatgatcacagctcactgcagctttgaccttccaggctcaagcgatcctcccacctcagcctccctagtacctgggactacaggcatgcatcaccatgcctggctaatttttgaatctttttgtagagacagggtctcactgtgttgcccaggctggtctcgaactctggggctcaggcgatctgcctgccttggtctcccaaag

SEQ ID NO: 35791 - DNA, 425 bp, Homo sapiens
  misc_feature (1)...(425): n = A,T,C or G
ataaatgtgtgactagtacttacatttctggtcatttgttttgcatggacaattttttatgtaattttaaaaattgcttattaaaaaattgctaaatctcttagattctaaaggaagagaatataaagttgatgtattagagatactgtgtggaaacaattaatatgttaaaatattggcaaaaaaaaacaaagaagaaataaaatataaccctagcatttttacttgcagncttctcatttttgcttaacttttttcataaatagcaatttaacaaaacctaacactttaatgtgacaaaaccaaacactttaagaaaaactgagctctacagtgtactatacctgaaaaggtgctggatgtcaccaacatcattaatttccactgagctgaaatttctctaacatgcaggtctatctcacaat

SEQ ID NO: 35792 - DNA, 410 bp, Homo sapiens
cccacgcgtccgggtggcttgtctatcactggctctcacaacatgtgtggggactatctgtacagcggccacacggtcatgctaacacttacctacttatttatcaaagagtattcccctcggcgactctggtggtatcactggatttgctggcttctcagcgtagttggaatcttctgtattctcttagcgcatgaccactacactgtggacgtggtggtggcatattacatcaccacgagactcttctggtggtatcacactatggccaatcagcaagtgctaaaggaagcttcccagatgaacctcctggccagggtgtggtggtacaggccatttcagtactttgaaaagaatgtccaaggaattgtacctcgatcttaccattggcctttcccctggccagtagt

SEQ ID NO: 35793 - DNA, 413 bp, Homo sapiens
cggacgcgtgggcggacgcgtgggactagttctagatcgcgagcggccgcccttttttttttttttaaaaaaacaaaccctttggaaacaaaaaaaagggaaaacaggcaccccgttaacgggggaaaattaagccgcaaaaaaaatcccctttgggggccctgtccgggggcgggaaacccacgggcaaaggaaaaccacccaaaaccccccaagctcggggggttcccattttggaaaaaaacccccgttggacaatttctttccacgggggcaaaaaaagggggaaaagatgggggggaaaccctttggggggggagcaaaaaaccaaaattcccgcagagtctaaattttgggaagggggtaaaagaccccccccttctctccttaaaatgttaaaaatttttttcccc

SEQ ID NO: 35794 - DNA, 413 bp, Homo sapiens
cggacgcgtggggtgcgaggagacagccaattacctggtcatttggtgcattgacctagaggtggaggagaaatgtgcactcatggagcaggtggcccaccagacaatcgtcatgcaatttatcctggagctggccaagagcctaaaggtggacccccgggcctgcttccggcagttcttcactaagattaagacagccgatcgccagtacatggagggcttcaacgacgagctggaagccttcaaggagcgtgtgcggggccgtgccaagctgcgcatcgagaaggccatgaaggagtacgaggaggaggagcgcaagaagcggctcggccccggcggcctggaccccgtcgaggtctacgagtccctccctgaggaactccagaagtgcttcgatgtgaaggacgtgcaga

SEQ ID NO: 35795 - DNA, 403 bp, Homo sapiens
ctcaccgacctgcctggatgaactctagattttccttctccttctgcaggttggcaatctcggtctgcaaagcagacgtgtcatcttctaatcggtccggctccgcttggagtgtatcagtcagctccctcctccggatgcggcatttggctgcagccatcttattcctttcccttcggattctcctttgctcttcttcttctggagataactgatccaacttgcccctgctgccaatgctctgcgctcggcctactgtcatgggcttcacaacgccagccctggagtatgccccaccggagggggcggagactccaaaagggtgaggggctctggtctgcgatggcgccacagaggagaccagggcgggctgcaccagccactgcaggtcacgactgtacgg

SEQ ID NO: 35796 - DNA, 489 bp, Homo sapiens
  misc_feature (1)...(489): n = A,T,C or G
agtgcactagactgcgacctgcgcacgaacnnccgggtcgacccacgcgtccgcggacgcgtgggcggacgcgtgggtaacaatttacaaggaatgcagaaaaagagaaaataagtgtagaaagaagaaaataatacaaggaggggaagttgctaaacaaaacgtatgctgcaaagtcacttacatccacttgcttatgtagggccacatatttggctctgaattttccaggcaattcaagagggctcacaaccagatagagatccggtgtccataagattcaaacaaaccaattgcttacgataacatagtttctccagttgctgaaaccagagagcaatttctccaaaagtttgccacaaagactacactgtaagttacagtgaccaccatccttacagccaacacagtacaatttcacaggaatcgtttctcaatatnagctaaaacacagtgttttttttttttttaataaaaaagtacagaact

SEQ ID NO: 35797 - DNA, 428 bp, Homo sapiens
  misc_feature (1)...(428): n = A,T,C or G
cgtttgtcctgttaattcactctcgacggtgagttactaattaacttttggcaggtacaacagataagtcctcacaaactgttcccagccctaggctgacatgagagacgaacaggctgtccacctttcttctccatccaatgggatggatccatgttcattcccacttcacaccttggtcctgctgattagagagctcatcagaggggcctggaaaggctgagcaagtaccagtgacaatggccatttaagaattctcaggccccatgtgccagccttcttgggaactgagctggctttctgggttttctcatgcctggncttactgcttcttcctcaaggctcttgttctcccagaagcctcagggtaatgtgttggttagcacgtaactactangaatggngccctanggattatagccaggacn

SEQ ID NO: 35798 - DNA, 428 bp, Homo sapiens
tgcttttggaactaagagctagtatcttggattaactgatgcctgctagtgctttctgattactcgcattctgtttcttgctttaaaagaagagtaaagacaagagtgttggaccagtattgcagttctgtagtgtcatttcttataaaaaacaaaacaacaacaataatttatcaaaattggcatatttaaagcctaacattctaataaaggcacaaatttctttttaaaaaaaaaaaaaaaaaaaaaaaaaaaaaaagaaaaaaaaataaaaatagagagaggaaaaaataaaaaaaagggggggggcccttataaaaattttctgggggggccaataaaaacccggcggtgaaaaaaaattttttctttttttttggggggtaataaaaaacccccggtgggttttttgggggactccttttttg

SEQ ID NO: 35799 - DNA, 295 bp, Homo sapiens
gatgagtgggggcaggcaggggattggctaagaacctgactcttgcactctggccttctcccaggctgagctttatcatatcatcagcagcaacctggagaaaattgtcaacccaaagggtgaagaaaagccatctatgtactgaacccgggactagaaggaaaataaatgatctatatgttgtgtggaaaaaaaaaaaaaaggggcggccgttttaaaggatccctgggggggcccaagtttacgcgggcatgcaacgtaatagttttttccttatagggaggcgtataaaaac

SEQ ID NO: 35800 - DNA, 415 bp, Homo sapiens
  misc_feature (1)...(415): n = A,T,C or G
cccacgcgtacgcccacgcgtccgctagctcagcactgatcccccaatgctgttgtcatagcatatggtgtttttttattgttaaagagagagaagataatctttagcatgtggttatttagacctatggctttactatttccatttttgtaaagcagcctcttgccccttccttctcgtggcccagtggacattgcttatttaggagcactctcccagtggtgtgccacagcaagcctgtgctctgtcatcactccaagagtatattcatgcactgctgcttggtatatttgaaatcacatgaaggtatatgatgttgtttggggcaatgtgatttaatcctctgccttgttaagaatagactangccaggctgggcgctgtggctcacgcctgtaatcctagcactttgggat

SEQ ID NO: 35801 - DNA, 417 bp, Homo sapiens
cgagcagcggcggcggcgcggagagacgcagcggaggttttcctggtttcggaccccagcggccggatggtgaaatcctccctgcagcggatcctcaatagccactgcttcgccagagagaaggaaggggataaacccagcgccaccatccacgccagccgcaccatgccgctcctaagcctgcacagccgcggcggcagcagcagtgagagttccagggtctccctccactgctgtagtaacccgggtccggggcctcggtggtgctcctgatgcccctcacccacccctgaagatcccaggtgggcgagggaatagtcagagggatcacaatctttcagctaacttattctactacgatgatcggctgaatgtaacagaggaactaacgtccaacgacaagacgaggattctcac

SEQ ID NO: 35802 - DNA, 414 bp, Homo sapiens
  misc_feature (1)...(414): n = A,T,C or G
cagaaggtcatgacccacgtcagcaacggctgtcagctgctgcttggggtcaagggacacgccttctgaacgtcccctccccctttacggacaccccctcgcttggacggctgggcacacgcctcccactggggtccagggagcaggcggtgggcacccaccctgggacctaggggcgccgcaaaccacactggactccggccctcctaccctgcgcccagtccttccacctcgacgtttacaagcccccccttccacttttttttgtatgttttttttctgctggaaacagactcgattcatattgaatataatatatttgtgtatttaacagggaggggaagagggggcgatcgcggcggagctggccccgccgcctggtactcaagcccgcggngacattgggaaggggaa

SEQ ID NO: 35803 - DNA, 414 bp, Homo sapiens
cggacgcgtgggtcgtgagccaccgcgcccagccctagtttgatagggaagtaattttatgaccttgggccattttcacaaagaaatgagatctaagtttcagaacttgactgtcttctttaaaacaccacattttacatgtttcaagacgattacctagattttggggggagagatgtggattagatttggagaccatctcaccagattttgacatttcaggttagtactccagtagttaagcaaggaccagtgtcacagtcagccacacagcagcctgtaactgctgacaagcagcaaggtcatgaacctgtctctcctcgaagtcttcagcgctcaagtagccagagaagtccatcacctggtcccaatcatacttctaatagtagtaatgcatcaaatgcaacagttgta

SEQ ID NO: 35804 - DNA, 431 bp, Homo sapiens
  misc_feature (1)...(431): n = A,T,C or G
agcccatgaaccgtgcaccctccgacagcagtctgggcaccccctcggatggacggcctgaactccgaggcccgggtcgcagccgcaccaagcgctggccttttggcaagaagaacaagacagtggtgaccgaggattttagccacttgcccccagagcagcagcgaaaacggcttcaacagcagttggaagaacgcagtcgtgaacttcagaaggaggttgaccagagggaagccctaaagaaaatgaaggatgtctatgagaagacacctcagatgggggaccccgccagcttggagccccagatcgctgaaaccctgagcaacattgaacggctgaaattggaagtgcagaagtatgaggcgtggctggcagaagctgaaagtcgagtccttagcagccggngagacagcctgagccggcacgcccgg

SEQ ID NO: 35805 - DNA, 439 bp, Homo sapiens
cggacgcgtgggcgacccacgcgtccgctctgctttggtctgaagcactgcatgagtttgggaccaagaacttcaagagtcaagacagaaggaagccaagggagcagtgcaatggatttctcagtaaaggtagacatagagaaggaggtgacctgccccatctgcctggagctcctgacagaacctctgagcctagattgtggccacagcttctgccaagcctgcatcactgcaaagatcaaggagtcagtgatcatctcaagaggggaaagcagctgtcctgtgtgtcagaccagattccagcctgggaacctccgacctaatcggcatctggccaacattgttgagagagtcaaagaggttaagatgagcccacaggaggggcagaaaagagatgtctgtgagcaccatggaaaaaaactccagatcttctgtaagg

SEQ ID NO: 35806 - DNA, 432 bp, Homo sapiens
  misc_feature (1)...(432): n = A,T,C or G
gcaagcagaaaaagcgaggaggnggnggtggatttggctaccagaaaaccaagagagttgagaaatccaaaatctttaaacacattagcaagaaatcatctgacagcaggcagttctctcactgaacacatgccttcctttcatcttgaataactttgtcctaaaatgaattttttttccccttgatttaacaggatttttgtagactttagaatttggacttacctaacaagagtataaattgacttgggttgcaagcactgagcactgttacttctatcacgtctctcttttatttctgggatataaaacaggctttaagtttcttggttgcccaagggcagagcaaggaatatctggtgtttcttgtgatgataatattttaattttaaatatccctccctcatacaagtgtatgttaccattttaatn

SEQ ID NO: 35807 - DNA, 433 bp, Homo sapiens
  misc_feature (1)...(433): n = A,T,C or G
cccacgcgtncgcccacgcgtncggaaatgagaagatgaggccagggtacccttggggcagaagggagggaggattaagctcagggaacagctttacagagaaggtaacatttgcaccatattaaaggatggcaagaattgaggagtacaaaaaggagaatagtccaagaagaaacactcagggatgatttgcacattgtaaatttaggtaaccttacatgccttacatggggctgctgtgactgaggcacagggtcaaggaagggagcagagtcataaagctacccaggtcagccaaggccaggctaggaggcctgagctttatcctgcaggtgtgcagagccagaggagagtgcaagaagagacatggcacagtctgatctgttttgcacaaatcactctggaagcaatgaggaggggagaatggaggttt

SEQ ID NO: 35808 - DNA, 529 bp, Homo sapiens
  misc_feature (1)...(529): n = A,T,C or G
catcgatcgangctcgcgggaccggaccggaattnccgggcaatttatttagaacaaaattaacatgggcaaatgagatacctcagtgttacaacagagtatagaaatgtctagcaatagtcaaataatttgatctttaaatacaaaataaccacatgaacacctaatatacaggtttcatctgaatacatatttattagataaatattagaggttgtcacatcatctaactacatacagctttgcaagactagaaatcacaattagttttttgaccagtttaaagtatgaaatgattgcattgtacatacgatgtacaaagacgatgatggtttctgtgggagttacttcaggctgcactggtgggtgtgtttatgtgtgtacgtgtgaatcacctgtgatcatgatatcaaaaattatacaaagtatgaatttggttacaattttcttctgaaatccccgtttcttttcattatttgcatagcaccctaaaaatacacaggtggcaggactagtacactgaagctat

SEQ ID NO: 35809 - DNA, 423 bp, Homo sapiens
  misc_feature (1)...(423): n = A,T,C or G
tctcaccgttacccggggcaacagctgagccgtctgggaagggatgcatcttttcttctgtatgcttgagtcaagaactctaagtcatcttggtaataccgggttggatgcttaaagctgcagcaaaaagaccagaactttcaggaaaaaacactatatccaacaactcagatatggcagaagtgaagtcaatgttccgggaagttcttccaaagcaagggccactgtttgtggaagatataatgacaatggtgctgtgtaaacccaaacttttacccttaaaatctctgactctggaaaaactagagaaaatgcatcaagcagcacagaatacaattcgccaacaagaaatggcagaaaaggatcaacggcaaataacccactgaatgataactgagcactctagggaacaacctgccttan

SEQ ID NO: 35810 - DNA, 449 bp, Homo sapiens
  misc_feature (1)...(449): n = A,T,C or G
cccacgcgtccgcccacgcgtccgctcattgagaggtaatctagcattgtggttttaagggggtatgtgggtggttaatgaagtctggcttanaatcccagctctagatgaaaatgtattgacttggagagcaaagagagctgatgtgagaattaaatgaattaatatatgcaaagtgcttagaatagttcctggcacagagtaagtactcttttaagtgttaaataaatacctagatttgtttttaaaaaaatctccaaaatgtgtgtttgtgcatatatgcctagaaagataggataagccctcacaatggtaacttttgggtagaagggatacggcattttattattttttgcttatattgggctacttatcctactttgtaataacaaaagacaatttttanatttttttttttttttttgaaacggagttttgctgtggttgcc

SEQ ID NO: 35811 - DNA, 414 bp, Homo sapiens
ctttttctccaaaggagtgcttgtggagatcggatcttttctccagcaattgggggaaagaaggctttttctctgaattcgcttagtgtaaccagcggcgtatattttttaggcgccttttcgaaaacctagaaaataatattcatttgcttaaatcttattttatttttaagctcaaactgcttaagaataccttaattccttaaagtgaaataattttttgcaaaggggtttcctcgatttggagctttttttttcttccaccgtcgtttctaactcttagaaccaactcagttccatcatggtgatgttcaagaagatcaagtcttttgaggaggtctttaacgaccctgaaaaggtgaacggcattggcgagaatgtggctggccgggtgatactggaggagtgtgaagt

SEQ ID NO: 35812 - DNA, 416 bp, Homo sapiens
tgacgcgaagcggctgatcggccgcaagttcggctacccggtggtgcagtcggacatgaagcactggcctttccaggtgatcaacgacggagacaagcccaaggtgcaggtgagctacaagggggagaccaaggcattctaccccgaggagatctcgtccatggtgctgaccaagatgaaggagatcgccgaggcgtacctgggctacccggtgaccaacgcggtgatcaccgtgccggcctacttcaacgactcgcagcgccaggccaccaaggatgcgggtgtgatcgcggagctcaacgtgctgcggatcatcaacgagcccacggccgccgccatcgcctacggcctggacagaacgggcaagggggagcgcaacgtgctcatctttgacctgggcgggggcaccttcgacg

SEQ ID NO: 35813 - DNA, 395 bp, Homo sapiens
gaaagaagcttttactaagatttactcctctcaaataattaatttattattttcagtgattggagatcaagtaggtgaaatcaaaatatagaaaattttgctaataatgcccattttgttgcttggtatacttttaaatatactactttattccagtatgcatttgaagcaagaaatccattttgtgttttctaatgactttagaatatttctgtttaaggtagagattttctaaatattttgatatgagttgaaaataagtttttgtttactgttttatttagagttgacaaaaatattttgaagtgttacttacaactagacagtatttgaaacgattccttaattccatgggtttttgttgttgttgctccattatgcttttagtatacagg

SEQ ID NO: 35814 - DNA, 420 bp, Homo sapiens
  misc_feature (1)...(420): n = A,T,C or G
gcgagccttcagcttgcccctcctcatcatgctcagacttgtcctgacggagggcgactcccagacggaggccgatgccaaggccatccacaagctccggaagcatctgacgtggcaggttcacgagaagtggcacctggtggaggacctggcgtgactgctgccggagccaggcccgagcgactctccgggccccaagtaccctgcctcccaagcttagcgcccgcagtccttctgacccggatgcccatgccctggctccccgggccaccaagccccgcggacgggccccttcgtcgtggatgccgagggactgcgttccccttgccctggacagcacggtgcgccggcctgcgcccacagattccgctttcccagcggcgcggagctgtaaccccgaccactgcctccccgaagccn

SEQ ID NO: 35815 - DNA, 420 bp, Homo sapiens
  misc_feature (1)...(420): n = A,T,C or G
ctggtgaacaggacccgtcgccatgggccgtgtgatccgtggacagaggaagggcgccgggtctgtgttccgcgcgcacgtgaagcaccgtaaaggcgctgcgcgcctgcgcgccgtggatttcgctgagcggcacggctacatcaagggcatcgtcaaggacatcatccacgacccgggccgcggcgcgcccctcgccaaggtggtcttccgggatccgtatcggtttaagaagcggacggagctgttcattgccgccgagggcattcacacgggccagtttgtgtattgcggcaagaaggcccagctcaacattggcaatgtgctccctgtgggcaccatgcctgagggtacaatcgtgtgctgcctggaggagaagcctggagaccgtggcaagctggcccgggcatcagggaactn

SEQ ID NO: 35816 - DNA, 483 bp, Homo sapiens
  misc_feature (1)...(483): n = A,T,C or G
aactgaaagcagntcgaaccgctccgnnaaccctgggtcgacccacgcgtccgcagaggctttgagatagtaagtagctctcctaggttattcagctagttattgctgaaaccagaattcaaattcagagtttacaggtttagcatccctaatacgaaaatttgaaatctcgaatgctacaaaatctgaaactttttgagtagcaacatgatgctcaaaggagatgttcattggaggatttcagattttggattttcagattagggactctcaaccagtatgtattctgcagatattccaaaatccaaaaaattctgaaatctaaaatacttcgggtcccaagcatttgaaataagggatattcaacctgtagtatgctcttttcaatgtactttactgcctctgtttatttctctgcactttaaactgtatattaccagtctgattttcctacagttgcatattttcttaataggtntaaaa

SEQ ID NO: 35817 - DNA, 401 bp, Homo sapiens
acaataacctctgggatgcctggcaaaaggacctgtccttttgaaaagccagctgcatcagcatgctgaaacattcatggtggcaaaatttggaatgaggttttgataaccaccctttagcatcattacaataaaaaaatgggtttatgtgaatactccaagggacaggagaaaccagccagagacaaatcacattatgttactctgtggtgtccactgcaattacgtgtaggaatttgtatccaagcagaaccagtcccactcactacagtgagtgttaaccctacctaccttctgttgaataatttgacttctactatggcttactttttaaaactgtttgttcaaagctgagctagggaagttgccaagccttaaaggaagagaatacaatatttatt

SEQ ID NO: 35818 - DNA, 407 bp, Homo sapiens
  misc_feature (1)...(407): n = A,T,C or G
ccgcgtccgccccgcgagcacagagcctcgcctttgccgatccgccgcccgtccacacccgccgccagctcaccatggatgatgatatcgccgcgctcgtcgtcgacaacggctccggcatgtgcaaggccggcttcgcgggcgacgatgccccccgggccgtcttcccctccatcgtggggcgccccaggcaccagggcgtgatggtgggcatgggtcanaaggattcctatgtgggcgacgaggcccagagcaagagaggcatcctcaccctgaagtaccccatcgagcacggcatcgtcaccaactgggacgacatggagaaaatctggcaccacaccttctacaatgagctgcgtgtggctcccgaggagcaccccgtgctgctgaccgaggcccccctgaac

SEQ ID NO: 35819 - DNA, 422 bp, Homo sapiens
  misc_feature (1)...(422): n = A,T,C or G
gcagaactagcagaacttgtccccatggaatacgttggcataccagaatgcataaaacaagttgatcaagaacttaatggaaaacaagatgaaccgaaaaatgaacagtaagtttggcatctagtccaaacaagactgaagaatgtgctgatggagcagtgctgtttctgcattcataatgcatttattggcccatatttttatgtaacctgttacaaaatagacttgactttttcataatggacttttgtattatacaagggactgttcactgctgtactggtttgcaaatttcttgaatttagctctttaatagctaactgtattattatcgctttatattttatattgctaaatagagaaccacactttatataaagtagtttttgcatttgtttattgaatgatgcatcttcttcggn

SEQ ID NO: 35820 - DNA, 488 bp, Homo sapiens
  misc_feature (1)...(488): n = A,T,C or G
cgatccaactgagatcatgagacntgcgcacggaaccccgggtcgacccacgcgtccgccgcaacctttccaagggagtggttgtgtgatcgccatcttacggaaaagatgttctcgtccgtggcgcagctggcgcgggcgaaccccttgaacacgccacatctgcagctggtgcacgatggtctcggggacctccgcagcaactccccagggcccacgggccagccccgccgccctcgcaacctggcagacgccgccgtggaagagtacagttgtgaatttggctccgcgaagtattatgcactgcgtggctttggtggggtcttaagttgtggtctgacacacactgctgtggctcccctggatttaaagaaatgccgtatgcaggtggacccccaaaagtacaagggcatatttaacggattctcagttacacttaaagaggatggtgttcgtggcttggctaaaggatgggctccgactatcct

SEQ ID NO: 35821 - DNA, 375 bp, Homo sapiens
  misc_feature (1)...(375): n = A,T,C or G
gaaaattatttgggaaagtttattaactactctttctgctgagtaaatttaaatgtgttctggacattgttgaggtctagaattgtctatacaatgccctgtacaagctacattgctgtcattttcaaaatcaggagtttatttggattacatatactttgtgcttaattttaagtaatgattacttcaagactggtgaattatacgtgactttttgtgcctgttctttataggctatggaaagggcaaatggaatggagctggatggtagaagaattcgggtggattattctataaccaagagagcgcacacaccaacaccaggcatctacatgggcagaccaactcagtaagagttcaagtttcctaagctan

SEQ ID NO: 35822 - DNA, 415 bp, Homo sapiens
  misc_feature (1)...(415): n = A,T,C or G
agaatttcaaggctcttaccttactttatttttgtccatttctcttccctcctcttgcattttaaagaggagggtttgtctctttgagtttgatggcagaatcactgatgggaatccagctttttgctggcatttaaatagtgaaaagagtgtatatgtgaacttgacactccaaactcctgtcatggcacggaagctaggagtgctgctggacccttcctaaacctgtcactcaagaggacttcagctctgctgttgggctggtgtgtggacagaaggaatggaaagccaaattaatttagtccagatttctaggtttgggtttttctaaaaataaaagattacatttacttcttttactttntataaagnttttttttccttagtctcctacttagagatattctagaaaatg

SEQ ID NO: 35823 - DNA, 270 bp, Homo sapiens
attacaagagaagtgtggttttatttgtaaaaataagcaaatgctaggccttttaatctaagtctgtaactacacatgtgatatttatgtgtacatggtacttttctcgttataagactattccttttatcctttgccaattaaatgttggttttctctgaaaaaaaaaaaaaagggggggccgttttaaaggatccttgggggggccaaagttaacccgggctggcaaagttatagttttttccttatagggaggcgaataaaaaccta

SEQ ID NO: 35824 - DNA, 415 bp, Homo sapiens
cccacgcgtccgcccacgcgtccgcccacgcgtccgcccacgcgtccgcccacgcgtccggccttatttagcctctcctgtaagggtgatctagccaggtacattttaaacaatgcttcagtgtagaaggtgtaaactattttgggcttgatgtgctgagaatgttgcttttttttttcctttgttaaaatatttaaatagaagtgaaaaggtcctctgaggatcagatcatgcatgcgccattttttacttaatgcagctgttaaattggcaaagctctaaaatgcactgctgccatctagggatacacttttgtaaagtacagcaaaacctacagatatatacagtatataaatatatatatatatatatctatatttcggggggtgggagaaatccaaaataaagtaaatgc

SEQ ID NO: 35825 - DNA, 463 bp, Homo sapiens
  misc_feature (1)...(463): n = A,T,C or G
cggacgcgtgggcggacgcgtgggttttttttcaaaataaaaatttattcaatctgtaacaagaacattgaatctgcacatttgcgcacaagttcacatttaaaaacagtggagcatatctgtaataaaaaaatctatgatacaagtggaacatcccaaccaccaggaagattaaggaaggagatgagaccactctatattctgcttcaaatgcctcaaaaatgtcccagagattccagggagcacctgctttaataaaacatgagcataaaagtttggggtggcttggggcaaaggtaacagtcagaggagagtcttctggacttgttttccatgttagaacaagtcctacaaaacaaagcagaaagaanaaaaaaaaaaggaaaggtnggggcccctttaaatatgccaggcaacccaaaatccaccggaacataaaagacaaacttttccctgtggtttt

SEQ ID NO: 35826 - DNA, 378 bp, Homo sapiens
  misc_feature (1)...(378): n = A,T,C or G
cggacgcgtgggttaatctcttaccagtcattcgagatgacttgcttgttgcagatattcaacatatggaagtcagctgtttggcattttaagtattattttatgtgatcccacataggagagcttaatatttaaacagttttatgctttagttgattcagagttcacatactctttggaccttagagtatgaaaattgatacatctttaattatcctggggtagtctaaagaacccaaattttatagccaaagagactatcctgatattttccctggctttgtaaactcggatagattgcttattgctttttgcttgtttgtttgatttttcttgagacggagtcgctctgtcgcccaagctggagtgcagagtccn

SEQ ID NO: 35827 - DNA, 408 bp, Homo sapiens
ggaagctttctcctcatgctttcaaaaccgaatctggggaggaaactgacctcatttctcccccgcaggaggaagttaagtcttcagagcctactgaggatgtggagcccaaagaggctgaagatgatgatacaggacccgaggagggctcaccgcccaaagaagagaaagaaaagatgtccggttctgcctccagtgagaaccgtgaagggacactttcggattccacgggtagcgagaaggatgacctttatccgaacggttctggaaatggcagcgcggagagcagccacttctttgcatatctggtgactgcagccattcttgtggctgtcctctatatcgctcatcacaacaagcggaagatcattgcttttgtcctggaaggaaaaagatctaaagtcaccc

SEQ ID NO: 35828 - DNA, 402 bp, Homo sapiens
  misc_feature (1)...(402): n = A,T,C or G
gcgctgatcctataccaccatttaggactatgagacctgcttcttcacaggttccacgagtcatgtcaacagagcgtgttgctaacacatcaggacagacaatgggtccacgtcctgcagctgcagacgctgcagctactcctgctgtccgcaccggtccacagtataaatatgctgcaggagttcgcaatcctcaccaacatcttaatgcacagccacaagttacaatgcaacagcctgctgttcatgtacaaggtcaggaacctttgactgcttccatgatggcatctgcccctcctcaagagcaaaagcatatgttgggtgaacggctgtttcctcttattcaagccatgcaccctactcttgctgngaaaatcactggcatgttggtggagattgatn

SEQ ID NO: 35829 - DNA, 407 bp, Homo sapiens
cggacgcgtgggcggacgcgtggtctacccacgcgttcggcatgttatgtagctgtctctactatgagaaggtgcaatgtatgtttaactaattaaaacacattagttgaaatattttgctctaaaacattttatgttctacgtgtgcataaactgaaaaaatgagcttacttttataattatctaattgaaatgcttttgctttacatttccaactatatatttagatatagtaggggcattagccgaaagaaatttttatgtatttatgaaaaaaatttcttatcatcatcggatgcttatcagatatgacgaataaataatatgttaactttaattctggtgaaattctattttgtaaaagatgaatgggagacacctcagataaaaaattgcaacattactat

SEQ ID NO: 35830 - DNA, 409 bp, Homo sapiens
  misc_feature (1)...(409): n = A,T,C or G
acttcagcctggaaattgcttgccttttaaagaagcatatatgggttggaattatgccaaagcataggaagctgggaataagcaaacaaatgctgatatagtcagcaaatttggatagtctctagggctcatcatttttcatactacctctctcttctggcctgtgtctaaggaattgtacaacataggccagggccaacaaagtggagaggtggacacattttcatgttcattactaaaacaaacagcaaaactattggtttgttattctgtgttttcctcaagtcagtacatactatttggtttcaggatttctttccatttctctatcaagcattaaataattgagaactgtttannaaaaaacaaaaaattnntaatttataaaaaaaacaaaaaaaatattggt

SEQ ID NO: 35831 - DNA, 472 bp, Homo sapiens
atttcttataccttctgacagcccaacttccaaaggacagctctggggtactcgttggatgtctgtgagtacctggtcatacgggtcagtagggataagaattgtctctgggctgaggaattcttctgttctctggtttcaccagcgttgggtttgctcatgtaatgtggccaccatactcaaatggtgtcatggctgaagttggccaccttgcttgagggacaagttgtttatgtatcagctctctgctgggtctccctttccatggcaaatgggcagctccatcctcttgactcttctaaatgcccaaaagaggtgtcatgctctgggggtacgatgtttatactccgtaaagaacatacaaggacattcactgctgatttttttttttgtttgtttgagacagggtctcactctgtcgctcaggctgcaatgccatgatgcaatctttgctcactgaacctccgccctt

SEQ ID NO: 35832 - DNA, 408 bp, Homo sapiens
  misc_feature (1)...(408): n = A,T,C or G
aaagaaagtgtgggttaatagccttcaagatagaagatgccctttcatctctgttaagtgtcctcctttagaaacttgagtagaaggaaaactgaccagagtagactgcttccttaagtcttctgggttccaactgtttgtaatatcagcatccaagatgatacgagggaagcacaatgctttggactgtgatttgagatttagaaataaattagatatattattgaggcttagaatcctcaaactttgtattttatacatttagccaataaggaattaatatctggggaaataaatttaggcaaatatttcttttttaatgttttattacctgcttctcctgtgttttagttcaacatttgngcttcttggcctgattttcatacaatctcaatttacgaagctgtn

SEQ ID NO: 35833 - DNA, 417 bp, Homo sapiens
cccacgcgtccgaaccaccaaaatacatagcttcgacaagatggaagtttatttctctctcccataacagtgcagtgatagtcagctggtccaggccaggcaaggggctggtccatgatgtcatcaggcacccaggttcctactgtcttgccatgtggccacagttagcaacaaaggaggctgtaaatttagtttctacttgggcagccaaaactctgaggaaggagattctgctagtaaaaaggagtgggggaagaatggccattgggagacaacaagcagactcaaccaggcctctttgttggcttcctttcctcctgctgcacatgagccttcgccgtgcatttggagccatgacagctgatagctccagacctgcatcctcctagcttgggggctctgaatgaaaggtttctt

SEQ ID NO: 35834 - DNA, 409 bp, Homo sapiens
acgtctagatctccatcagcagtgagctgcacactggctccattcccctggacgagagcagcagtgacatgctggtcattgtggatgacccagcctcctcagcccctcagtctcgagctaccaactctcccgcatccataacaggctccgtctcagataccgtgaatggaatttccattcaggaaatgccagctgcaggacgtggtcactcagcccgaagccgaggtcgtcccaaaggtgtcaggaagcacagccaaaggagcaaggaagggccggagccgaaagtccacggcaggcagtgctgctgcaatggcaggagccaaagccggggctgcagcggcctctgcagctgcctatgccgcatacgggtacaacgtgtctaaaggaatctccgccagcagtcctctgg

SEQ ID NO: 35835 - DNA, 421 bp, Homo sapiens
  misc_feature (1)...(421): n = A,T,C or G
ctcaaatcaagttttcttttaagaatcaatcatgtcagtctgcttagaaataacagaagaaaatagaattgacattgaaatctaggaaaattattctataatttccatttacttaagacttaatgagactttaaaagcattttttaacctcctaagtatcaagtatagaaaatcttcatggaattcacaaagtaatttggaaattaggttgaaacatatctcttatcttacgaaaaaatggtagcattttaaacaaaatagaaagttgcaaggcaaatgtttatttaaaagagcaggccaggcgcggtggctcacgcctgtaatcccagcactttgggaggctgaggcgggtggatcacgaggtcaggagatcgagaccatcctggctaacacggtgaaacccgtctctactaanaatgcn

SEQ ID NO: 35836 - DNA, 419 bp, Homo sapiens
atgaaccaccagtccaagaatcaatttattgaccacttctttcaagtcatttgtctgcacctctcgggtcatgatttccatcatcttcttccggatttggcggacctgttggtgctgagcataagaggtcttccgtatctgattgttgcgttttttagtaaaaccaacacagaacagacgaagcaagtaaccatcggtagtcttgacatcaacgtgagcttcaatcattgtctgccatttttttgaccatggaacacattttgtcacgggtaagatccatgccatggaagttagtcaggtgctaaagttgaacgagctgatggatatgaaccaccagtccaagaatctgtttaaagttcagacttcaaatagtggcaaataaaaagtgctatttgtgaaaaaaaaaaaaaaaaaggggg

SEQ ID NO: 35837 - DNA, 413 bp, Homo sapiens
aactttcatatctgaccatagtggaatactggatattagaattattttcctgctaccaacagctataaaactggacaaaatatctgaagcaactatttttgggtctcagaaaacaagacagacatgtgattgtggataaaataaaaagatgtgaggttaactcaaaactcctcttggctttctgcctgagagcactttacaaatcatggtacaggaaactggagcccagtgagcagcatcttgccttgcggagtatcttagttcgttttctgctgctgcaacagaataccagactgggtaatttataaagagatttatttggcttatgattctggaggctgggaagtgcaaaatgaagggaccacatcttgttatgtcataacatggcagaaggcatcacacagacagagaga

SEQ ID NO: 35838 - DNA, 420 bp, Homo sapiens
  misc_feature (1)...(420): n = A,T,C or G
cccacgcgtccggactagttctagatcgcgagcggccgcccttttttttttttttttttttttttttttttttttttttttttgtttttttncaccaacaaacggggtttttttcggaacggttttgaaaagaatttttaaaaaaccccgggggggggggggggggcccaaacccccagggggggggccccaattttttgtctgccccccccccccctggtttttttcgccaaaaaaggggtttttttttgaggttttttttgtatcacccgcgggggaaaaaattttttccccccccccccttttttttttttgggggagggggggtttttttaaaaaaaaaaattgtttgccacacaaaggtgtttttttttaacacgccccgggggtttttttttttttggaaagaggggggggcgt

SEQ ID NO: 35839 - DNA, 402 bp, Homo sapiens
cccacgcgtccggattgttttaattttagaaatagtccttttaaaaccaaatttttcaacttttactattttcatttaatactaccatgcccagcccagtgtactttttaaaatataaaacaagacgaaaagattaaaaatgcatattacctatagatcatgtaataggataatgtggcagagaaaagatgaatgaataaaaaccaattgcatttctatggggcaataaataaaaggagaataaaataagaaaaatacatacacattttttaaaaagtactgtgtaggagctgtatgaaaagagtggccctttactgggagattcagaaggagagttgaataaatagaaaggttgagctctttttttgttgctaaaatttttagttgtaatttagacacaag

SEQ ID NO: 35840 - DNA, 412 bp, Homo sapiens
acccgaggcctccgctgcgcgtggattctgctgcgaaccggagaccatggccaaaccagcacagggtgccaagtaccggggctccatccatgacttcccaggctttgaccccaaccaggatgccgaggctctgtacactgccatgaagggctttggcagtgacaaggaggccatattggacataatcacctcacggagcaacaggcagaggcaggaggtctgccagagctacaagtccctctacggcaaggacctcattgctgatttaaagtatgaattgacgggcaagtttgaacggttgattgtgggcctgatgaggccacctgcctattgtgatgccaaagaaattaaagatgccatctcgggcattggcactgatgagaagtgcctcattgagatcttggcttcccgg

SEQ ID NO: 35841 - DNA, 476 bp, Homo sapiens
  misc_feature (1)...(476): n = A,T,C or G
acgtccctaagctagcgcaatcgcgnnggactttnngggtcgagccacgcgtccgggcatgaagaggttctcaggcagctccaacagggcctggcgaaatgttactccgtggcgcttgacaaaagaggaggggtgtccgatgctaaaatcaccccccacactctcaattttgtgaagaagttggtgagcacgttaggggtgggcctggagaatgtgtccaacgtctcgaccatgtactgcagcgcagcctctgagactctggcccggcgggcgcaggccactggacaagaccctgtctttcagaagctgaaaggccagttcacgacggattttgacttcagcgttccaggatccatgaagcttcataatcttatttctaagttgaaaaagcggatcaaaatcttggaggccaagaccaagcaactccccaaattctttctcatagatgaaaagtgccgcctcttgagcaatttctn

SEQ ID NO: 35842 - DNA, 446 bp, Homo sapiens
  misc_feature (1)...(446): n = A,T,C or G
tgggaccngnnnnnnnnacgctaaaactgtgcagagacccgnccgaattccgggtcgaccacgcgtccgcttccccggaatctggggagggcttttgtttttacgttttcaagttcagcattgtattcggacagaagctgtgactgaagactcagtgccaaggaaaggggcttcttgtgtgtccctcgggtttggggctcttctcagagagcagcactccatatcccttactgtcaccttcactccccacacagctcatgagatgtgtgacccctgtttgagttttggtatttggtactggagggtggggggatgggggccagcagctgtcatcctcctgggaagccgagcagtgtccctggtgggtaacaccctcaagtctctttgccagtgaggccccaccacatcggtgtgagttaggtttctcatctggagctgtttctcag

SEQ ID NO: 35843 - DNA, 460 bp, Homo sapiens
cggacgcgtgggcgcggagcaccgctactacaggaagtcgctgccgttcggtgcgcagtccacgcagcgcgggcacacggagctgctgacgggggagcaagccctggccgacttcgcagagctgctccgcgcgctacgacgcgacctcggggcccaggatgcccccgccatcgccttcggtggaagttatggggggatgctcagtgcctacctgaggatgaagtatccccacctggtggcgggggcgctggcggccagcgcgcccgttctagctgtggcaggcctcggcgactccaaccagttcttccgggacgtcacggcggactttgagggccagagtcccaaatgcacccagggtgtgcgggaagcgttccgacagatcaaggacttgttcctacagggagcctacgacacggtccgctgggagttcggcacctgccagccgctgtcagacgagaag

SEQ ID NO: 35844 - DNA, 408 bp, Homo sapiens
  misc_feature (1)...(408): n = A,T,C or G
gcctgcatttcccgggtaggggcaaatgactccaagctggtctctaagccaatacccttataaaccagagcccaggaaagacagctcgagtgtataattctctggagctcaattctatgcagttgtgctgatatttcattaagtcactgtgtatttttaagtgttgatacattaaaagtcgctttatggaagatgagtaaattttttaaatacttggaaattttatttccttgttaacttctacagatcagggcatgcaaccaaaagcagcttaaatgaaatattttaaaataaaatatcaggaagctatttttagatttcttctggcttatgtttctactttaggaccctcattgttctcttattaaaaaaaattatttcctgtgcatctcatggactgcagggtan

SEQ ID NO: 35845 - DNA, 263 bp, Homo sapiens
ctaagatctgactgcctcctttctctggcctcttcccccttccctcttctcttcagctaggctagctggtttggagtagaatggcaactaattctaatttttatttattaaatatttggggttttggttttaaagccagaattacggctagcacctagcatttcagcagagggaccattttagaccaaaatgtactgttaatgggtttttttttaaaattaaaagattaaataaaaaatattaaataaaaaaaaaaaaaaagg

SEQ ID NO: 35846 - DNA, 417 bp, Homo sapiens
accacttattgtggccttgaactcctggatccaagggatcctcccacctcggcctctcgagtggctgggaccgcagaagcacaccaccatacctggctaattttattttttgtagagacgaggttttcactatgttgcccaagctgaaatttctagttttgatgattatattttacattatttagaacaagtttcatgtttttaaaaaagcaaagcaaaactcagagaatctccttattgagctattttgaatagatttttaagttttattttattttttggggagaggggtcttgctgtgttgcccaggctggtctcgaactcctggcctcgggcgatccttccaccttggtctcccaaagcactgggattatacatgtaaaccaccatgtgtgctctcaaatagatttttaaatg

SEQ ID NO: 35847 - DNA, 462 bp, Homo sapiens
cggacgcgtgggtgaagttcaattgagagagatggaagacagtaatagaaattccattgttgaactgaggcatctcctagcgactcaacagaaggcagccaataggtggaaagaagaaacgaagaaacttactgaaagtgcagaaattagaatcaataatctaaagagtgagctgagtcgacagaaacttcatacccaagagctgctttctcagctggaaatggcaaatgaaaaggtagctgagaatgaaaagctaattctagagcatcaagaaaaagccaacagacttcaaaggcgtctaagtcaggcagaagagagagctgcttcagcttcccagcagctcagtgtgattacagtgcagagaagaaaagcagcctccctgatgaatctggaaaatatttaaaaatattcatagttcactcacagaactttagagttgggaaagcagttggactagaagtg

SEQ ID NO: 35848 - DNA, 470 bp, Homo sapiens
  misc_feature (1)...(470): n = A,T,C or G
tttgtcgcctgcngaccgttgacgaccctgcgggtagacccacgcgatcgcccacgcgtccgcggacgcgtggggtgctcanagaggcggcaaaagaatcaaaacaaactcccaaagctgaactccaagccggtccctgaggggctacctggcatggcgctcggggcctctcggggagaagcctatgagcccttggcgtggaaccctgaggagtccactggggggcctcattctgccccaccgacagcacccagcccttttctgttcagtgagaccactgccatgaagtgcaggagccccggctgccccttcacactgaatgtgcagcacaacggattttgtgaacgttgccacaacgcccggcaacttcacgccagccacgccccagaccacacaaggcacttggatcccgggaagtgccaagcctgcctccaggatgttaccaggacatttaatgggatctgcagtag

SEQ ID NO: 35849 - DNA, 403 bp, Homo sapiens
  misc_feature (1)...(403): n = A,T,C or G
ctcagtaatacttgagttgttgcaatatttgattatccatttggttgttacagaaaaattcttaactgtaattgatggttgttgccgtaatagtatattgcctgtatttctacctctagtaatgggctttatgtgctagattttaatatccttgagcctgggcaagtgcacaagtctttttaaaagaaacatggtttacttgcacaaaactgatcagttttgagagatcgttaatgcccttgaagtggtttttgtgggtgtgaaacaaatggtgagaatttgaattggtccctcctattatagtattgaaattaagtctacttaatttatcaagtcatgttcatgccctgattttatatacttgtatctatcaataaacattgtgatacttgaaaaaaaaaan

SEQ ID NO: 35850 - DNA, 379 bp, Homo sapiens
cttaaaggtcatcactatgtacataatttattaccatgtaatactattgaaaacattctggctaggtaagctgccttcttatttcatttatagataaacaagactgtaacataattatgtatgggggaggagtcagagctcgttaactcaattggtttgagcaattgctgataaggccaagagagtgaattcaatcccacacaggccagctaactttattctcttcctcagtcataagttaacccctagttccagctaaccatcttacaaatagtagagttgaccgtaaacaaactggttttttaaaaaaaggatggattattacagatcaatcactgatgtgaagaagattcagaactcatgggctacagtttggggg

SEQ ID NO: 35851 - DNA, 407 bp, Homo sapiens
aggtgtggcccccttcaggcctctttaatatggaatcccgggttcagttctgcctcacagggaccatggcattgtgtctcaaggtttcccagagcagcctggggctcgttccctcacctcccatccatgcatgtgttttagacttgtgaggattccctgagttccttgtggagcccgtgtgtggtaaggtgtctgagttgacgatttttaaaaaatctatgccttatttgtgcaataaaatacacaatgaataattaatgctcatagtaaaacatgttagacctcgtgaaaggaaaatcaatcttggggacccaaaatcactaagctaaagggaaaagtcaagctgggagctgctgagggcaaacctgcctccaattgtatccaaagtcacctgtctgctcaccgag

SEQ ID NO: 35852 - DNA, 402 bp, Homo sapiens
cggacgcgtggggttatttgccaacaattttactgtttctcttcatctggttataggatttctctgcctcttccaaacttttcctccctgaacctgaggggtaagcattttatttccctttaggaaaaacgtcagctgcttgtaaccactgtgtttatgtcaaagcattcattttttttaggatatctgaaaaaatgccatataagagaaaactctataaaacatctataattttcgaacccaagtacactcttgcattctatgctttaagttaaatgcaaactcctttttccttcttcctgctgcaagtactatctcatcctgatgctcaagagtgtcagggcctgggtttccaaacagagactaccctaaaattatttggcgagtagtactttacacaat

SEQ ID NO: 35853 - DNA, 400 bp, Homo sapiens
caaatcttagaaacacaaagatcaagagttgatctctctaatgtattagatcttcatgcctttgatagtctctctggaataagtttgcagaaaaaacttcagcatgtgccaggaacacaacctcaccttgatcagagtattgttacaatcacatttgaaggaccaggaaatgcaaaggaagaacatcttaatatgtttattcagaatctcctgtgggaaaagaatgtgagaaacaaggacaatcactgcatggaggtcataaggctgaagggattggtgtcaatcaaagacaaatcacaacaagtgattgtccagggtgtccatgagctctatgatctggaggagactccagtgagctggaaggatgacactgagagaacaaatcgattggtcctccttg

SEQ ID NO: 35854 - DNA, 411 bp, Homo sapiens
cccacgcgtccgtaccagtttcagtcattcagtcagtaccgctgtaagactgccaagaagtcagaggaggagattgactttcttcgttccaatcccaaaatctggaatgttcatagtgtcctcaatgtccttcattccctggtagacaaatccaacatcaaccgacagttggaggtatacacaagcggaggtgaccctgagagtgtggctggggagtatgggcggcactccctctacaaaatgcttggttacttcagcctggtcgggcttctccgcctgcactccctgttaggagattactaccaggccatcaaggtgctggagaacatcgaactgaacaagaagagtatgtattcccgtgtgccagagtgccaggtcaccacatactattatgttgggtttgcatatttg

SEQ ID NO: 35855 - DNA, 124 bp, Homo sapiens
cccacgcgtgcgcacagaaccaagactcatatccaggtataagatggcagatgggacacacactcatcaggcttagtgagcagccaatccatagggaactcatactcagccctaggggctgggc

SEQ ID NO: 35856 - DNA, 430 bp, Homo sapiens
cccacgcgtccgcagacttcgctcgtactcgtgcgcctcgcttcgcttttcctccgcaaccatgtctgacaaacccgatatggctgagatcgagaaattcgataagtcgaaactgaagaagacagagacgcaagagaaaaatccactgccttccaaagaaacgattgaacaggagaagcaagcaggcgaatcgtaatgaggcgtgcgccgccaatatgcactgtacattccacaagcattgccttcttattttacttcttttagctgtttaactttgtaagatgcaaagaggttggatcaagtttaaatgactgtgctgcccctttcacatcaaagaactactgacaacgaaggccgcgcctgcctttcccatctgtctatctatctggctggcagggaaggaaagaacttgcatgttggtgaaggaaga

SEQ ID NO: 35857 - DNA, 404 bp, Homo sapiens
cattgctgcctcattagccttgtattttgtgtgcatatcatatatccagacctgtatgttcgctttaagcattcttatatcacactgtctcctcatctaccatatggtaaatgttaaaactccacatttgtctgcatcagggaaaatgcatgggcacacatcctccctccctccctctctgctctcctcccttccttcaggcctcttagcattgtttgttttcccatttctgatactactactccatgctgaagatttgccatattactattttggaaacattgagtgatagaactcctagaaaatttgcaaagaaatgttacatactgtatatcaaactctcagattctagtgttgaaaaagtagcctatactttgctattacttatacctgctgccatagaa

SEQ ID NO: 35858 - DNA, 439 bp, Homo sapiens
  misc_feature (1)...(439): n = A,T,C or G
cccacgcgtncgggaatgagcttggaataaaagaacgctagtaatgactgatttgcaggttaggtgtaaacattaaatcctcataacaggctaatgagaggtgggagaaattatccccattttacagatgaaggaacagaggctcctagagactaaagaacttgctactcaatgaggtcaggattcacacctaggttgacctgaggatagctgctgcagtgctcacccttcctaccttcccaagaaacaatacgcagagaatttcttttctaaatattgtgtgcctagaaggtgctttgtgttatcgaaacagatatatatgtgtatatctggtctctttaaaattctctttaataaaaacaaaaagtgatgctagtggttaataaaagatatatatagaaaattgggtgtcctcgttaatcttctttaggaaagatag

SEQ ID NO: 35859 - DNA, 417 bp, Homo sapiens
aataatcctacttttatgtgaaaatttgactgctgagttaaaaacagagatattctcaattttgtctgagtcacctacctactcccattaaaaaaaaatacttagaatatggagagtttcctcaattttcaaatataacttacaggttgaaaaatttaaaaataatgtttcctttatatcattttgggagtacatgaaggtaaaagcttgtgttttatatattgttttatgataactttttctttgcaggaatggcattccaaagcagccaattgcttgtgctttcttaccccaacttaatggaagctgtgaagcatcattaaaataatggcttgtttgcttcctttgccagttggtgatggagttttgtggtgctggctctgtcaccgacctgatcaagaacacaaaaggtaacaa

SEQ ID NO: 35860 - DNA, 427 bp, Homo sapiens
  misc_feature (1)...(427): n = A,T,C or G
acaagagcaaatcctattgtcttcacccactccaagccaattaaaatctctgggaaagtgttttaatcattgccccaccttttcttctacagccaatgtgttcctttaaaattttaagtcaggtgcagcggctcacacttgtagccccagcatttgagagccctatgtgggaggattgcttgatgccaggagatagaggctgcagtgagctatgattgggccactgtactgcagcctgggtgacaagacaaccccgtggtctttaaaggaaatatatataaagtcatatcctttgtacattgctcgaaccacagtagtttctctcattcagtaaaagcccgtcattaagagctccataattatctttatctcagctgggattaaccccttggtgtcttcagtctttcttccggacaggacacacacn

SEQ ID NO: 35861 - DNA, 429 bp, Homo sapiens
gcctataccattcaaggacagtatgccattccacagccagatttgaccaagctgcaccagttggcaatgcaacagtctcattttcccatgacgcatggcaacaccggattcagtgcaggtttggatgcatctgctcagactacttctcatgaactcaccattccaaacgatttgattggctgcataatcgggcgtcaaggcgccaaaatcaatgagatccgtcagatgtctggggcgcagatcaaaattgcgaacccagtggaaggatctactgataggcaggttaccatcactggatctgctgccagcattagcctggctcaatatctaatcaatgtcaggctttcctcggagacgggtggcatggggagcagctagaacaatgcagattcatccataatccctttctgctgttcaccaccacccatg

SEQ ID NO: 35862 - DNA, 415 bp, Homo sapiens
  misc_feature (1)...(415): n = A,T,C or G
agacggccttggccggacttagcactcaggcctgtgaatcaggaaatacaaagacctccaaaaaaggaccagttcctcggatgtgccccctcacagagagatgaaggggcagcagaaaacagctgaaacggaagaggggacagtgcagattcaggaaggtgcagtggctactggggaagacccaaccagtgtggctattgccagcatccagtcagctgccaccttccctgaccccaacgtcaagtacgtcttccgaactgagaatgggggccaggtgatgtacagggtgatccaggtgtctgaggggcagctggatggccaaactgagggaactggcgccatcagtggctaccctgccactcaatccatgacccaggcggngatccagggtgctttcaccagtgatgatgcagtt

SEQ ID NO: 35863 - DNA, 442 bp, Homo sapiens
ctgtgcatagatgggagagccttctgctcagaggctcactcagtaacgttgtttaattctctgccctggggaaggaggatggattgagagaatgtctttctcctctcctaagtctttgctttccctgatttcttgatttcatcttcaaaggtgggcaaagttccctctgactcttcccccactccccatcttactgatttaatttaatttttcactccccagagtctaatatggattctgactcttaagtgcttccgccccctcactacctcctttaatacaaattcaataaaaaaggtgagatataaaacatataacaataaccccactccccaaattaataaaaaaaaataaattttaaagggggcgccccctttaaaggattctttggggggcccaattttcccccgctctctaacttatttttttttttttttttggg

SEQ ID NO: 35864 - DNA, 396 bp, Homo sapiens
cataaatattatactagcatttaccatctcacttctaggaatactagtatatcgctcacacctcatgtcctccctactatgcctagaaggaataatactatcgctgttcattatagctactctcataaccctcaacacccactccctcttagccaatattgtgcctattgccatactagtctttgccgcctgcgaaaaaaaaaaaaaagggggggccgttttaaaggacccctgggggggccaaagtttacgcgtgcttgcaaggtaatagctttttccttatgggggggcgaattatacgccagctggggatttttgggaaggaccctttcttggggggggggacatatggggacaacctccccccggagattaaacgctctgggggaaaaataa

SEQ ID NO: 35865 - DNA, 214 bp, Homo sapiens
atcccctccccgtttcagtggaccctgtggccaggtgcttttccctatccacaggggtgtttgtgtgtgtgcgcgtgtgcgtttcaataaagtttgtacactttcttaaaaaaaaaaaaaaggggcggccgctttaaaggatccctaggggggcccaaccttacccgggcatgcaaggtcataggtttttccctatagggaggcgtattataac

SEQ ID NO: 35866 - DNA, 411 bp, Homo sapiens
  misc_feature (1)...(411): n = A,T,C or G
tttaaatttcatttataatcatgatctcataatagtaccattcaattttctccaatagtctctggtatttttagtttgtttgaagcagcgtccaaataattgcagttaactgataggtctgttaagtctcttaatcaatagaatacttttccccatcccttttttccttgcattttatttgttggaaaatccaggctgattgttcagtagtcagaagttccctcattctggcctttgctgtttccactggacatgttcttctgcctgtgggtggatatagaggctcgatcgctttctggctcagcctttcagcacaggtacttcagaggtgcgtgatgccctcaccaggaggcacacatctgcactgatgtgagatccagtgttgntggtgntgttttttccttttgtctt

SEQ ID NO: 35867 - DNA, 430 bp, Homo sapiens
ttgttaacctcgtatacagcgccgaattctggtcgaccccgcgtccgctccctctctcatggttcttgacctagaaccaatgtttgaagaactcacagacactggagggtggagggtgggagagaccagagctacctgtgcacaggtacccacctgtccttcctccgtgccaacagtgtcctaccagcaaggggtcctgtctgccaccatcctctatgagatcctgctagggaaggccaccctgtatgctgtgctggtcagcgcccttgtgttgatggccatggtaagcaggagggcaggatggggccagcaggctggaggtgacacactgacaccaagcacccagaagtatagagtccctgccaggattggagctgggcagtagggagggaagagatttcattcaggcgcctcagaagataacttgcac

SEQ ID NO: 35868 - DNA, 395 bp, Homo sapiens
tgcaaatatattttcccagtctgtggcttgtcacttcattttgagacagagtctcgctctgtcacgtaggctggagtgcagtggcgcaatcttggctcactgcaacctctgcctcccgggttcatgccattctcctgcctcagcctcctaagtacttggaactacaggcatgcactaccatgcccggctaatttttttgtatttttagtagacatggggtttcatcgtgttagcaggatggtctcaatctccggacctcgtgatctacccgcctctgcctcccaaagtgctgggattacaggcatcagccaccgtgcccggctgccacttcgttttcttagtactatctttggatgaccagatattttaattttggtgaaatctaacttattatt

SEQ ID NO: 35869 - DNA, 400 bp, Homo sapiens
cccacgcgtccggcctattctctatctattttgaaagattttggcactatatttaattggaaggtaaaatattgtacatgtgatccagagtaaatgagaagtctctatctgagctggtcagttactggagtacatgttactaatctgggtttaaagtttacttcattatctgctagtgtcatccacagcagttcatcctcatccacactaagccatcctgttagcttttaaaggaagttaatttaattaacattaatatactctatgggctccctctcccacctgtctgcatagaaaggcagaattagacatagcatgctttggaaaagcaaataggaattgttgggaatgatttaatcttgttgttgttgttgttgttgttcacttgtggttctacatt

SEQ ID NO: 35870 - DNA, 429 bp, Homo sapiens
tagttaggatggctgaaggggatactcaccggctgaaggccgactgtgattccccctacccccacaaggcgattttgaccccctgagggctgctctagaggactcaggccccgaagctgtcccagggaggtccccgctgcatcccaccacccaagctgtgcctcatggagtcgatgtttagcagccctgccgaggcggcgctgcagcgagagaccggggtgccaggactgcttactcctcttccggacctggacggagtgtacgagctggagcgagtcgctggatttgtccgcgacctggggtgtgaacgagttgccttgcagttccctgaccagctattgggagatgctgtggctgtggctgcacgactggaggagacgacagggtcaaagatgttcattctgggtgacacagcctacggcagctgcg

SEQ ID NO: 35871 - DNA, 418 bp, Homo sapiens
cggacgcgtgggtttgggaggctgagacaggtggattgcttgagccaaggagttttgaggccagcttgggcaatgtggtgaaacctgtctctactaaaaaataaaataaataaataaataaataaataaaatttaaaagaagctgggctgagatgggagatttgcctgagcctgggaactcaaggctgcagtgggtggtgattgcaccactgcactccagcctgggtgatgggagtgagaccctgtctcaaaaaacaaaatccaaatatgttgattagccatttacatgtttgtagtttttttttttttaatttcagggaattgcctgttcatagcttttttctacttttcaggagtgttggcatttttcttattgatatctaataactctttatatctgaaggatatgaacgctttg

SEQ ID NO: 35872 - DNA, 407 bp, Homo sapiens
  misc_feature (1)...(407): n = A,T,C or G
cttcagaacaggggcacagaaagggattggttctggatgaagcgatggcatcaagaagggatttaaaatatgccagtggaaatggtccaggagagagaaattgatgtcccagggacagtgaaggtaaattcagaaacagattctctatgtgagagagaggggatgggatccagagctcacgaatagtgatcgattcctgaggaggggaaagagcaaacagaatgcccatgaatggggcaggtcatccctctgtcctcaatgaaaagggtaactggggaatagctaagattgaagaaagttccagaggatgtaagacaagaagggcgtagattctgcatttggggtgttggttggttttcactatcttaagtctagagcaatgatagacattctccactgtcccaacn

SEQ ID NO: 35873 - DNA, 398 bp, Homo sapiens
cggacgcgtgggcgcatgcatgctcccgggaagggcctgtcccagtcggctttaccctatcgacgcagcgtccccacttggttgaagttgacatctgacgacgtgaaggagcagatttacaaactggccaagaagggccttactccttcacagatcggtgtaatcctgagagattcacatggtgttgcacaagtacgttttgtgacaggcaataaaattttaagaattcttaagtctaagggacttgctcctgatcttcctgaagatctctaccatttaattaagaaagcagttgctgttcgaaagcatcttgagaggaacagaaaggataaggatgctaaattccgtctgattctaatagagagccggattcaccgtttggctcgatattataagac

SEQ ID NO: 35874 - DNA, 440 bp, Homo sapiens
  misc_feature (1)...(440): n = A,T,C or G
cacggtacttcgtgaatttgaggcaagagaaacaatgaagagtttgtgtagatcctgactttagggcagaatgtacatgttagggcatagtanaagaaagactggggccagtttgaggaacttgaagaaacctaaatgccaggctaaagaaggtacacttttttcctagagtaatttggcagccattgaaggttgagaagaggatggtccctcttagatgatcagctgccagagccttagtgtgtatcttggctcaacacatctgaaggacaaaggccctggaacagggtggttttgttggtcttacctgtgggctatttctggaatcctttctgtgtcactcgatggggacccacaccactgtcagtccttgctaggctactgttaacacagcctccgtgctcctatcacttgagcttttgctccccagtctgtctctg

SEQ ID NO: 35875 - DNA, 401 bp, Homo sapiens
agctgaacaagacccctggggccccagagagctcagcgctgcagccaccacctcaaagctcagagggactggtgggggccctgatgcacgtgatgcaaaaaagaagcagagccatccactcctccgacgaaggggaggaccaggctggcgatgaagatgaagatgatgaatgggatgactgagtggctgagttacttgctgccctgtgctcctccccgcaggacatggctccccctccacctgctctgagcccaccctccactctcctcttccaggcccccaaccccccatttcttgcccaccaacccctccaatgctggtatccctgcctggtactcacactcacccaacaatgccaagggcctttttatacaaaaattctcagttctcttcactcgagg

SEQ ID NO: 35876 - DNA, 411 bp, Homo sapiens
cgtcggtcctctccgcgcgcgggtaggaaccgtccacggccttaaagaagcctcctcaccagccatacttcccattgcctccagctgttgcacggaggtttcacatcatatttccagaaggctcctggaaagagtgaatatgtgtcgcatccagagagctgatggggattgtgacttggctgctgtcatccttcatgtcaagcgcagaagaatctgtgtcagcccgcacaaccatactgttaagcagtggatgaaagtgcaagctgccaagaaaaatggtaaaggaaatgtttgccacaggaagaaacaccatggcaagaggaacagtaacagggcacatcaggggaaacacgaaacatacggccataaaactccttattagagagtctacagataaatctacagagacaa

SEQ ID NO: 35877 - DNA, 458 bp, Homo sapiens
gagggagcgcttgagggggactggcctggcgtgcactccgcacctcggggacattattgcgcgtggaacggctgcttttggaagactattgcccagaagaaaagatgtttggttttcacaagccaaagatgtaccgaagtatagagggctgctgtatttgcagagctaagtcctccagttctcgattcactgacagtaaacgctatgaaaaggacttccagagctgttttggattgcatgagactcgttcaggagacatctgcaatgcctgtgtcctgcttgtgaaaagatggaagaagttgccagcaggatcaaaaaaaaactggaatcatgtggtagatgcaagggctggacccagtctaaagactacattgaaaccaaagaaagtgaaaactctatctgggaacaggataaaaagcaaccagatcagtaaactgcagaaggaatttaaacgtcat

SEQ ID NO: 35878 - DNA, 425 bp, Homo sapiens
  misc_feature (1)...(425): n = A,T,C or G
tagaagaaaatactccaccaaaaatggaaaaagaaggcttggagataatgattgggaagaagaaaggcatccagggtcattacaattcttgttacttagactcaaccttattctgcttatttgcttttagttctgttctggacactgtgttacttagacccaaagaaaagaacgatgtagaatattatagtgaaacccaagagctactgaggacagaaattgttaatcctctgagaattaattgatactggaacaagacaggtcaaacccgaaactctaaggcatgttaacacctccttcctagaagagaggaagaataaacattctttggatcctattgttcagccagttaagaatcatagttaatcacactttcttaccctgtccacgatatggatatgtgtgtgccacaaaaattatgaaan

SEQ ID NO: 35879 - DNA, 384 bp, Homo sapiens
  misc_feature (1)...(384): n = A,T,C or G
cccacgcgtncgcggacgcgtgggggaaatcttcaagaacgaagagaggaggagcatcttcacacgcaaaccccaagtcccgcggtttcctgaagagacagaaagccacgaagaggacaatgggggctggtcgtcctttgaagaagacgattatgaaagtcccaatgatgaccaggatggggaggatgatggagactatgagtcccccaatgaggaggaagaggcacccgtggaagatgacgcggattatgagccgccaccctccaatgacgaggaagctctgcagaactccatcctgcctgccaagcctttccccaactccaactccatgtacatcgaccggcccccctctgggaaaaccccccagcagcctcctgtgccccn

SEQ ID NO: 35880 - DNA, 396 bp, Homo sapiens
  misc_feature (1)...(396): n = A,T,C or G
tttgtgtttcaagttaactcaaacgctttatttaaaggagcatctcagttacgtgtggcggacaaaaaaaagcgtttgtgtttcaagttaactcaaaaaaaaaaaaaaaggggcgcccttttaaaagaacccttggggggcccaagctttccgggggctggcaaagtattacttttttccttatggggggcctttttataccctgcttgggatttttgggaaggaaccttttttttggggggggaacatattggaccaacctccctacaaaatttaaaccctttagggaaaataaaaatttttaaggggaaaagggggtaaaccaccctccttaggctggcttttaaaaaatttggnnnnnnttncncnnaaactttttttctgcgggggaagaac

SEQ ID NO: 35881 - DNA, 337 bp, Homo sapiens
ttgctgtttacctctttgctgataaatttgcagtaattacagcattgcaggaaaaacaatctgttattccagtcttaaatttttctaaaagaagacaatattttagaactgaagcattgagaacttcccttgcaaattatttttaaaattctatcttgtttttctatgtatttctttctgactagacttgtgatatgcgtgtgtttatgtacagaaatttttagtgtttttgttatgttctgttattgacccaaaggccatctttattttctataactgttcaaaatttatattaaaatctacttaggagataatttctttaaaaaaaaaaaaaagg

SEQ ID NO: 35882 - DNA, 413 bp, Homo sapiens
aaatgttcaaggaaagcaattcagagttttgtttcttagcacagtacgtacaagacatacttgtaaacataaacagacaccaattaaaaagaaagagcaacttctggaagattccacagaggacttagattatggttttttatctaactacaagcttctcaatactgccatcacaagagcacaatccctggttgctgtggtgggtgatcccattgctctgtgctctattggaagatgcaggaaattttgggaacggtttattgccctgtgtcatgaaaacagtagcctacatggaatcacttttgaacagatcaaagcccagttagaggctttagaactaaagaagacatatgtgttgaatccgctggcacctgaatttataccccgggctctaaaacttgcacattcaagaa

SEQ ID NO: 35883 - DNA, 401 bp, Homo sapiens
gtcatcaaaccaggtgagtggacatttgcatgccatctttatgaataagatttatctgtggatcatattaaaggtactgattgttctcatctctgacttccctaattatagccctggaggagggccactaagacctaaagtttaacaggccccattggtgatgctcagtgatatttaacaccttctctctgttttaaaactcatgggtgtgcctgggcgtggtggctcacacctctaatcccagcactttgggaggctgaggccggtggatcatgaggtcaggaattcgagaccagcctggccaacatagtaaaaccttgtctccactaaaaatacaaaaaattagccaggcatggttacgggagcctgtaattctagctacttggggggctgaagcagga

SEQ ID NO: 35884 - DNA, 439 bp, Homo sapiens
ctgaagtatatagtttgtgtatattgacagagctcttttataactaaagcaaatttaatttttttgtactagaaaaaaatttgaacattttagttcttggttataaaaatgttaattcagaattagtttaatgccttaattaaactaattaatagctttggacacttaaaagagctctaaatttgcttgtacataaaggcttaatttgttttccttgttagggtcaagggtgtcctccactctttaacagctgctggacagacacattagagcagctgtttgttattgataataaaatattataaaactacaaaaaaaaaaaaaaggggcggccgttttaaagaacccttgggggggccaatttttacgggggatggcaaggtattatttttttccttatggggagcggaattataacctccctgggattttttggaaa

SEQ ID NO: 35885 - DNA, 419 bp, Homo sapiens
  misc_feature (1)...(419): n = A,T,C or G
cagggccagctgtgtagtggctcggtgtgatttgttagctctttgaggcagggtaccctcctcaggatttcgatatgcaaaaaatcaaatctctcatgacccgacagggtctgaaaagccctcaagaaagcctcagtgatcttggtgccatagagagtctccgggtccctggaaagttagagccctaacgtgatgttaactttgaattcagggaacttcgagaacagccaagtgaccctcaagctgaacaagagcttattaatagtattgaacaagtatatttttctgtggattcatttgatattgttaaatatgagctggagaagcttccacctgttctcaatttgcaagaattagaggcgtatagagacaaattgaaacaacagcaagctgcaattacatcttcttataggtatctn

SEQ ID NO: 35886 - DNA, 449 bp, Homo sapiens
  misc_feature (1)...(449): n = A,T,C or G
attgagacctacgtcttgcttggctagcatctgctgcacccaagcctgagccggttcctgttcaaaagggagaacctaaagaagtagttaaacctgtgcccattacatctcctgctgtgtccaaagtcacttccacaaacaacatggcctacaataaggcaccacggccttttggttctgtgttttcaccaaaagtcacatccatcccatcaccatcgtctgccttcaccccagcccatgcgaccacctcatcacatgcttccccttcacccgtggctgccgtcactcctcccctgttcgctgcatctggactgcatgctaatgccaatcttagtgctgaccagtctccatctgcactgagcgctggtaaaactgcagttaatgtcccacggcagcccacagtcaccagcgtgtgttccgagacttctcangagctagcagagggacag

SEQ ID NO: 35887 - DNA, 439 bp, Homo sapiens
ccaacagtaacctctgttgttactctttgactaaaataattattttagttaaaaaaaaaaaaaaggaagaaagagggaacccggggaccactatacaaagggaagcagggtaaaacctgaaacaaaatttttttttttacacttttggagttccataaggaaaaacagagggggctccccaaaggggagcctagggcctcctctgttttctttaaggaaacccagggggtaaaaaactattttaaattccccatgccgcccagggtaccaagaaaaaaaaaaggccgccgaagtaaaaggaaaaaaccaaatttgggttgagggaaaaaaaaaaaacttttgctcaaaaagtggagggagaaaaaaaaaaagggccttaattacacaaactcacacacacacacacccacacactctctcctggggtgttatcttttta

SEQ ID NO: 35888 - DNA, 421 bp, Homo sapiens
cccacgcgtgcgatcttgacttatgatattttactctgagaaacaagacagccacacagcgaagccattggggcgcttgtcctaggcgggaaggaaaaggccactaactcttttttttttttttatcctggccctgacccagaagatagaggtggaccccccccggtcgggctgcctgcggcaatttaaagctgtaccgcaccccgggggtttttttttttttaagctccccctaaacaaaacaggcttggggaatgagaaaatagttcccttgaagtggaagaggggggaaaaagaccttcaaaagggaaaaaaaaagggccctttggttttaaaaagggatccaaaagatttggcgggacccagtttaattttttttttttttcacaaaagctcctttaagcccccagcccgtttttag

SEQ ID NO: 35889 - DNA, 405 bp, Homo sapiens
cccgagcaggcgcccccatggcccgaccccgctgattccttcactcggccatgctcccgcggcccctgcggctgcttttggacacgagcccccccgggggagtcgtactgagcagcttccgaagccgggaccccgaagagggtgggggcccaggtggcctggtcgtgggcggggggcaggaggaagaggaggaggaagaagaagaggcccctgtgtccgtctgggatgaggaggaggatggtgccgtgtttaccgtcacaagccgccaatatcgacctcttgatcccttggtccctatgcctcccccacgttcctcccgacggctccgagctggcactctggaggccctggtcagacacctactggatacccggacatcagggactgatgtgagcttcatgtcag

SEQ ID NO: 35890 - DNA, 470 bp, Homo sapiens
  misc_feature (1)...(470): n = A,T,C or G
agggcggaanaaaatgacgcatcgatgagcncgtaataccggccgacccacgcgtcgggcattggtgttcaaggcctagaaggaaacctccagatgcctggaattaagtcctctggatgtgatgtgaacctgccaggcgtgaatgtgaaactcccaactgggcagatttctgggcctgaaatcaaaggtggtctgaaaggttcagaagtaggtttccatggggctgctcctgatatcagtgtgaaggggcctgcctttaatatggcatctcctgagtcagattttggcatcaacttgaagggcccaaaaatcaaaggaggtgcggatgtttcagggggtgtcagtgccccagacatcagccttggtgaagggcatttgagtgttaaaggttccgggggtgagtggaagggaccccaagtctcctctgctctcaacttggacacatctaagtttgctgggggccttcattn

SEQ ID NO: 35891 - DNA, 415 bp, Homo sapiens
  misc_feature (1)...(415): n = A,T,C or G
cccacgcgtccgggtggacaaaccagaacagacagttaagacctttccactgccagctgttggtttggaaagagcagctactacaaaggcagataaagacatcaagaatccaatccaaccatccttcaaaatgttaaaaaatactaaaccaatgactactttccaagaagaaaccaaggctcagttttacgcatcagagaaaacctctcctaaaagagaacttgccaaagatttgcctaaatcaggagaaagtcgatgtaatccttcagaagctggagcgtctttactggttggctcaatagaaccttctttgtcaaatcaagatagaaaatattcctcaactctacctaatgatgtacaaactacctctggtgatctcaaattggacaaaattgatccccaaagacaggaactn

SEQ ID NO: 35892 - DNA, 423 bp, Homo sapiens
  misc_feature (1)...(423): n = A,T,C or G
cggggccaggtcctttttatcctggaccaggacctggggacttccccaatgcttatggaacgcctttttacccaagtcagccggtgtatcagtcagcacctatcatagtgcctacgcagcaacagccgcctccagccaagagagagaaaaaaactataagaattcgggatccaaaccagggaggtaaagacataacagaggagattatgtctggaggtggcagcagaaatcctactccacccataggaagacccacgtccacacctactcctcctcagcagctgcccagccaggtccccgagcacagccctgtggtttatgggactgtggagagcgctcatcttgctgccagcacccctgtcactgcagctagcgaccagaagcaagggtttcgttctatcacccaggatggagtgcagtgan

SEQ ID NO: 35893 - DNA, 260 bp, Homo sapiens
atcactacgtaaggaaagctccttccgcccctccaaagccctcaccatgcctaacagaggcatgcatttttatatcagattattcaaggacttctgtttaaaagatgtttataatgtctgggagagaggataggatgggaatgctgccctaaaggaagggctggtgaaaggtgtttatacaaggttctattaaccacttctaagggtacacctccctccaaactactgcattttctatggattaaaaaaaaaaaaaaagg

SEQ ID NO: 35894 - DNA, 405 bp, Homo sapiens
tgcggccttggccacatccctattaacagaggcagctccacttcagacagggacaaggcttcctgctgtgcctttctggcagggttttgtggggtcacatgggaagcaatgtgttacgcaagcagtctccatgtgtgtgtaaactgctgtcctggtgacttgtccctcttcttagtggaaatgcatttgagatggtgacagggctggatgaacgtgtgaccctgggagatccgggctggactgtggaccccgatgggccagtgtccttgtggcccacagcatagcactggggacagagcgctctatgcaggtgaggcgtatgagaacagcatggtaaataattgatgaagtcacatttgttcaacttaaaggattgttctttattctgaagttattttcttcctg

SEQ ID NO: 35895 - DNA, 425 bp, Homo sapiens
  misc_feature (1)...(425): n = A,T,C or G
cattttctcagatctccttgaaaattgaggccttttcgatagtttcgggtcaggtaaaaatggcctcctggcgtaagcttttcaaggttttatggaggctttctgtaaattgtgataggaactttggaccttgaacttacgtatcatgtggagaagagccaatttaacaaactaggaagatgaaaagggaaattgtggccaaaactttgggaaaaggaggttcttaaaatcagcgtttcccctttgtgcacttgtagaaaaaaaagaaaaaccttctagagctgatttgatggacaatggagagagctttccctgtgattataaaaaaggaagctagctgctctacggtcatctttgcttagagtatactttaacctggcttttaaagcagtagtaactgccccaccaaaggtcttaaaagccan

SEQ ID NO: 35896 - DNA, 409 bp, Homo sapiens
aaatttggaatctggtaggtcgcccagacaatggagacatcctctcctctagcaggtcagcgactgagaggggcctgacttctgctgggacagctggagaggagtctcatgggctgggatgctgttgtggctttgactttggccagtgcttctgacagaggcggagcctggcaagtgtaccatcccacaggcagcaggcacacagcccatgggctggatccttccacactttcctgacagaccagaaccagagcatctcgaggcaactgttagaaatccagggacgagacaaacagagaagcgctggtgaagccaacatagagactgtcaatgtgtacacctcggttccacccccaccccccacccgtcacttagcccctgcctccttcccccactcgttgtcttggct

SEQ ID NO: 35897 - DNA, 412 bp, Homo sapiens
cgtcttctttggtagatttttaagatttagaaatccagtttgactgtgattaaaaattgggcaattcattatttgttcactatattgacagttttattttcccactcatctctattattcatgtgaaaccccaatttcttaataatagtaataagaaaggtaataacaatttacaattatggagtgtttactctaagacaagacctaggatgttttgtaatccttatttcctttcctcatatagcaaaaccccttcacattcaagctgacattctcttcaaataagtaacttagaactggcatatgtgtaactagatatgttacacatatgttccttaagtgagggtacaatgagtttggacactatatttctttaaattttagagctaaataaagtccatttttcttcaag

SEQ ID NO: 35898 - DNA, 422 bp, Homo sapiens
ctccctttctctttcctcattgccttctcccttcctgttccctcatctctgccttccccatgtctctcctctccttggccgtggcttctgtctgtgaggaggcaggagctggggagtgggagcctatgaccccacgtctgacagccatgtccacctgtgcccacagcttccgcccacagacctccagggacaggagcaaattgcaccacagctccccgcctggcctggccctccccaggcggctcagtggctcatgctgtcctgtgagagcccctgccccagagcggccccactaagcgcatgtggctcctgggctacccacagccagggcagcctgctggagccacagggccagggccatgcagatggaggcctctgggagccacctccaatacctcaccactcactcaaccagtggcacc

SEQ ID NO: 35899 - DNA, 413 bp, Homo sapiens
ttaggttatggaatccacaagaaaaattgccatgtatttgcacttacaatggagataaaaagcgtggaatacctacatcagttgactttataggctgtgatccaactcatatggtaacctctttcaacactggtagtgcagtaatttatgatttataaacatcacagtcattggtgatactttcatcacaggtagattctggtttacaatctaataatcatatcaacagagtagtaagtcatcccacacttcctgttacaataactgctcatgaagatagacacatcaaattttttgacaataaaacgggtaaaatgatccattctatggtagctcacttggatgctgttacaagtctagcagtagatactaatggaatctatttgatgtctggaagccatgactgttccatc

SEQ ID NO: 35900 - DNA, 382 bp, Homo sapiens
  misc_feature (1)...(382): n = A,T,C or G
cccacgcgtncgcggacgcgtgggggaatttagctgatagatggaaataatgagtcaagttgaaatggtagtaataaaaaaaaaacagaggtaaataattcctttgtggtcatcagtagacaacccagttgctgaagaaatgggtgaacttgaatataggccagcataaattatccatactaaaacacaaagagaaaaaaaatgaaaaaaaatcagagctgcaggacagtatcagcctaatatgtgtatgcttaaagtttcagaatgagagggataaatactaatgcagaagaaatatttgaagagataatggccaagaatttcccaaaagcaatgaaagacatcaaaccatagatgcaagacttaagaaacagcatgaact

SEQ ID NO: 35901 - DNA, 410 bp, Homo sapiens
  misc_feature (1)...(410): n = A,T,C or G
cggacgcgtgggcggacgcttgggcacaggtgtcgtgaaaactacccctaaaagccaaaatgggaaaggaaaagactcatatcaacattgtcgtcattggacacgtagattcgggcaagtccaccactactggccatctgatctataaatgcggtggcatcgacaaaagaaccattgaaaaatttgagaaggaggctgctgagatgggaaagggctccttcaagtatgcctgggtcttggataaactgaaagctgagcgtgaacgtggtatcaccattgatatctccttgtggaaatttgagaccagcaagtactatgtgactatcattgatgccccaggacacagagactttatcaaaaacatgattacagggacatctcacgctgactgtgctgtcctgattgttgcn

SEQ ID NO: 35902 - DNA, 419 bp, Homo sapiens
tcagtttcagtttcctggctctgggcagcagcaagaattcctctgcctcccatcctaccattcactgtcttgccggcagccagctgagagcaatgggatatggggagtcccagctgtcctcggtgcctgctcagaagctgggttggtttatccaggaatacctgaagccctacgaagaatgtcagacactgatcgacgagatggtgaacaccatctgtgacgtcctgcaggaacccgaacagttccccctggtgcagggagtggccataggtggctcctatggacggaaaacagtcttaagaggcaactccgatggtacccttgtcctcttcttcagtgacttaaaacaattccaggatcagaagagaagccaacgtgacatcctcgataaaactggggataagctgaagttctgtctg

SEQ ID NO: 35903 - DNA, 428 bp, Homo sapiens
cccacgcgtgcgcccacgcgtccgcccacgcgtccgtcgcagccaccgtcacccattggaatggccaacaggggacctgcatatggcctgagccgggaggtgcagcagaagattgagaaacaatatgatgcagatatggagcagatcctgatccagtggatcaccacccactgccgaaaggatgtgggccggccccagcctggacgcgagaacttccagaactggctcaaggatggcacggtgctatgtgagctcattaatgcactgtaccccgaggggcaggccccagtaaagaagatccaggcctccaccatggccttcaagcagatggagcagatctctcagttcctgcaagcagctgagcgctatggcattaacaccactgacatcttccagactgtggacctctgggaaggaaagaacatggc

SEQ ID NO: 35904 - DNA, 403 bp, Homo sapiens
  misc_feature (1)...(403): n = A,T,C or G
aagactaataaagctatcagttgagggatttgcagttgataatatggctggagaggttaaggctttcttcgagagtcacccagctccttcagctgagcgtaccatccagcagtgttgggaaaatattctgctgaatgctgcctggctaaagcgagatgctgagagcatccaccagtacctccttcagcggaaggcctcaccacccacagtgtgaatcctgaggtgccgccattggcggttctgctgcttcgctgcagggataaggtggagctaccgaacagctgattcatatgccaagaatttggagtcttctttcaaaccagngggggttggacaatgaatgtagttaactggttcctgctcacactccagaattaaattctattgaaaaaggaaaatcagn

SEQ ID NO: 35905 - DNA, 408 bp, Homo sapiens
caccagacctgttctgcccaatgcctttttgattacagtgtagcttgcccaccgcatttgtcgttttagatactttgctagccggccactttggatttcatcagacagtcctaacaatattgtctgaacggctgaatatgaatagatacagcagaggcactcctgatatatgatttttatccatgcgtcagtttttcccacccagtgtagcatcctaaagatagccagaagctaagctgcagtgaggctgtgattgggcgtaaaagtgggagcattgggacctcacattacacacacgagagatcataaccatgtgaaaaggcaaaaagcatgtgtttgcaacatctgataacttcatggcctttgataaatgtatatatgtatatgtgcatggactgtgtttccagt

SEQ ID NO: 35906 - DNA, 423 bp, Homo sapiens
atcttattcagggcttctcagcctgaacccccaaccagattaatttctccacagctggaattccaagtgcttggggataatgatacctctgacctttcttccttttgggaagtacttgagtgtgcagctgcatgaggcctcagcaggagagagattttaggtccaagaagctataccagtaggacaaggcaggaaaatactacactttcaggatcaagcccctctgactctcatttggaaactggatgtttgctaagcacctgcttcttaaggatgccgagggatttaatgatactcccagaaacctggagagattaatggggcctatggagaagtgctctgaactcagtgttgggacttgaataaaattaaccattgtcatgttttcagaacaactaagctggtttatatttcatgtgcatg

SEQ ID NO: 35907 - DNA, 416 bp, Homo sapiens
agagtgttaccctgatgctgaaacagcaatgcaagaatggactaatacgtctactgaaggacatcttggttggtcccagattttggcaattatgaaaaatctgctatagatgtatgcaggttttctgtggacgtacgttttccactcctgctgcatgagaaagcctacatgaggcccctggcacatccgaggtgtgtggggcaccggggcccccagaagaggagcctttggatctgatgggagcaagggctctactgaggctgccagagatgccctcggactcagagtatggaagcgggaccattgccgttacaaacccgcagggaaggggctgagcacccggagggctgtgtgtgcacacatgacgtcatcggagtcaggaaggcagccagccgcgaggagatgggaaactggtc

SEQ ID NO: 35908 - DNA, 418 bp, Homo sapiens
cggacgcgggggcaaacatcagtgttcatggcagttttgtttgtatttatttagagtgaaagtatctttgaattcttaaaccattcttacaatgatagcttttaaggtcatctttgtacagctgcaaagaagactgtaattatatttcctagtctgaaataaggtttaatttttcagtttcaatttaggatttactagagacagttatatgtatctattctctagttttgaatttgtaatattttcattggcttctattatacaatagttcgtctttgtaaatgttttttctcctgaccacaaaatggagtatggctgagcattaattcctgtaggtttttggagtcattatagctctcaagaaaataagcagttccattactagattaatcttcagtatctgagacaatgaagccag

SEQ ID NO: 35909 - DNA, 406 bp, Homo sapiens
caactacagaagagtttgaggatgatgctattaagaaagcccacatagagaaggattttatcgctttctgctcttccacaccagataatgtttcttggagacatcccacaatgggctctgtttttattggaagactcattgaacatatgcaagaatatgcctgttcctgtgatgtggaggaaattttccgcaaggttcgattttcatttgagcagccagatggtagagcgcagatgcccaccactgaaagagtgactttgacaagatgtttctacctcttcccaggacattaaaataaggaaactgtatgaatgtctgtgggcaggtacatgtgtatggtcgggagtgtgggaaggttgaggaaagggtactgaaagtccatttgagtcaagaactctaggtttac

SEQ ID NO: 35910 - DNA, 426 bp, Homo sapiens
  misc_feature (1)...(426): n = A,T,C or G
cttccgccctcagtggagcctgagagacactctcgtaagttacatgcaaactaaagaaagtgaaattcttcctgaaatggcatctcagttcccagaagagatactgctcgccagctgtgtctcagtgtggaaaacagctgctgtgctgaaatggaatcgagaaatgagatagaattatttcctcagctatctttggatgactttggagagaagactcctctctcctcgtctgcggcgtggacttgatcatggactggtgcctttgcattcagaaggagagctgtcagcgtagcaccgaattcaagaccaaggcgtgctacctgagctgacagctttttgaaagccgagctgtttctgaaccatgtacatacatgttctgaaactttctcatcattntatgagtactgttcattgagagatgacaat

SEQ ID NO: 35911 - DNA, 424 bp, Homo sapiens
  misc_feature (1)...(424): n = A,T,C or G
cggatcctttgcagcagtgcttcaaaaaagatgaaattttagatgggcagaaatcaggcgaccatctaaagcggggtaggaagaaagggagaaacagacaggaagttcctgcatttactgaacctgacacgactgcagaggttaaaacaccttttgatttggccaaggcacaagagaacagcaactccgtaaagaagaagacaaagtttgtcaatttatacacaagagagggacaggacaggcttgcagtcctgctccctggtcgtcacccttgtgattgcctgggccagaagcacaagctcatcaataactgtctgatctgtgggcgcattgtctgtgaacaagaaggctcaggcccttgcttattctgtggcactctgtggggnnnnnnnnnnnnnnnnnnnnnnnnnnnnnnnnnnnnnnn

SEQ ID NO: 35912 - DNA, 406 bp, Homo sapiens
cttgactccgctgctcgccatgtcttctcacaagactttcaggattaagcgattcctggccaagaaacaaaagcaaaatcgtcccattccccagtggattcggatgaaaactggaaataaaatcaggtacaactccaaaaggagacattggagaagaaccaagctgggtctataaggaattgcacatgagatggcacacatatttatgctgtctgaaggtcacgatcatgttaccatatcaagctgaaaatgtcaccactatctggagatttcgacgtgttttcctctctgaatctgttatgaacacgttggttggctggattcagtaataaatatgtaaggcctttctttttaaaaaaaaaaaaaaaaaaaaaaaaggggcggccgttttaaagaatccctcggg

SEQ ID NO: 35913 - DNA, 429 bp, Homo sapiens
  misc_feature (1)...(429): n = A,T,C or G
tttccttaccattaccagctcagaagtagctagaggctttctacccaaaggatgccaaagtatagcagggcaggcctggagctagggccttcacatggtggtagcaagtttttcaaatctaatacaatcaagtacaatacttcctttaaatgcttctgtggacctggcatgaaagatccctagattgaaaggaataatacctccatgtctcctgtatgttgagtctagaattgctgtgttgttcttagaagcagtctttgggcaacaacttgaaaggggaaaaaaaaactacaaaaacttaactttggtataggccaagtcagggagaaagtagagaaagctgtcatgccacagacttctttagtggagatcatttcctttttaactntgttcaggttgcccttcaccatggatacagtccggtaccct

SEQ ID NO: 35914 - DNA, 415 bp, Homo sapiens
cggacgcgtgggcgatattttacttccagcatagttttaaagataatttattggtcacatacaacaaaagagaattgtgaagtccattatagggctctgagcctgatttaaggtcacagaaaaaagaatttgagtctgtttctcagatctagaattatcaaatataaggaacttctcggcaaaacagggtgccactttcagctgacaaacttgtgggtgagaataaagaaaagtgagtctttaagtagataaagttgtcactcataatggtgtgtaacagtagaaaccttactttaccatctccacggatatgaggatatatgatcttcatggtgtgaacgtctaacttggctgagacaagctatcagtaaaagaaccaagatatagtgaagaatgaggatttcagagccaggag

SEQ ID NO: 35915 - DNA, 404 bp, Homo sapiens
  misc_feature (1)...(404): n = A,T,C or G
catgatcttaaaattataggaaaaattctgctgtaataaatttcatgggattctcaaattgttaattcactaaaagcagcttaaatcatctctggatcatctccagattgagaaaattatatctagcatagtaaaatattctaatgaaagagaaagttgctgaacccactagaagaatgtgtatccattgcctcatcttctgttttctcaacttcttgggtttgtttttttttttttaataggttcgggttggtttcactatatgattcaatatttgcgaaatggggggaggactttaagaagcaaccaatctggctttaaggaggattactttaccccacctctcctctttttatggaacctaaaaggtggaacataaagcttcgggggaagagaaaatcccn

SEQ ID NO: 35916 - DNA, 396 bp, Homo sapiens
cgaggccctgctgggcggatggagcttgatcccaagccgccccgtctgcggctctgggccctgatcccctggcttcccaggaagcagcggcccaggatcagccagacctctctgcctgtccctggccctggctctggcccccagcgggactcggatgagggcgtcctcaaggagatctccatcacgcaccacgtcaaggctggctctgagaaggctgatccatcccatttcgagctcctcaaggttctgggccagggatcctttggcaaagtcttcctggtgcggaaagtcacccggcctgacagtgggcacctgtatgctatgaaggtgctgaagaaggcaacgctgaaagtacgtgaccgcgtccggaccaagatggagagagacatcctggct

SEQ ID NO: 35917 - DNA, 421 bp, Homo sapiens
  misc_feature (1)...(421): n = A,T,C or G
cccacgcgtncggtgatattccaggggatccaaacaatgaatataaattagccctcaaaaactatattccttatttaactaaattgaaattttctttgaaaaagtcctttgatttttttgatgaatactttgtcctgctaaaacccaggaacaatattaagcaaaatgaagaggccaaaactcggagaaaggtggctggatattttaagaaatatgtagatatattttgtctcttagaagaatcacaaaacaacacaggtcttggatcaaagttcagtgagccacttcaagtagagagatgcaggagaaacctagtagctttaaaagcagacaagttttctgggctcttggaatatcttatcaaaagtcaagaggatgctataagcactatgaaatgtatagtgaacgaatatacttttct

SEQ ID NO: 35918 - DNA, 415 bp, Homo sapiens
  misc_feature (1)...(415): n = A,T,C or G
tgttgcccaggctggaaatgtaaattttcttaatctcccatcttagacttatttggtcggcttggagttaggaaggaatttctcactgtagtgccaaacctgaaatggtaattgtgtttgagcaagttccctgaacataagggggcgaggggaggaagaggaacgatccaggccatttttgttgatacataatagttgcacatattttttcatgtgatgtttcgatatatgcatacaatgtgtaatgatcagatcagggtaattgagatatttgttgcctcaaacattttttctttgttgggaatgtttaaactcttctagctgttttgaaatatacaataaatgattgttaactatagtcaccctactgtgctattggacattanaacttattccttctattataactgtgtgt

SEQ ID NO: 35919 - DNA, 417 bp, Homo sapiens
cggacgcgtgggggagagtgtaatattttggactgctgttttccattaatgaggagagcaacaggcccctgattatacagttccaaagtaataagatgttaattgtaattcagccagaaagtacatgtctcccattgggaggatttggtgttaaataccaaactgctagccctagtattatggagatgaacatgatgatgtaacttgtaatagcagaatagttaatgaatgaaactagttcttataatttatctttatttaaaagcttagcctgccttaaaactagagatcaactttctcagctgcaaaagcttctagtctttcaagaagttcatactttatgaaattgcacagtaagcatttatttttcagaccatttttgaacatcactcctaaattaataaagtattcctctgg

SEQ ID NO: 35920 - DNA, 425 bp, Homo sapiens
aaaacagacgcaggggtaagaatgagaatgaatctgaaaaaagagaactggtattcaaagaggatggtcaggagtatgctcaggtaatcaaaatgttgggaaatggacggctagaagcaatgtgtttcgatggtgtaaagaggttatgtcacatcagaggaaaattgagaaaaaaggtttggataaatacctcggacattattttggttggtctccgagactaccaggataacaaagctgatgtaattttaaaatacaatgcagacgaagctagaagtctgaaggcatacggcgagcttccagagcatgctaaaatcaatgaaactgatacatttggtcctggagatgatgatgaaattcagtttgatgacattggagatgatgatgaagatattgatgacatctaaattgaactcaacatttta

SEQ ID NO: 35921 - DNA, 431 bp, Homo sapiens
  misc_feature (1)...(431): n = A,T,C or G
caggagaggagagccagagaagtgacagggaagctacaggttacaacagatttgtgaactcagccaagcacagtggtggcagggcctagctgctacaaagaagacatgttttagacaaatactcatgtgtatgggcaaaaaactcgaggactgtatttgtgactaattgtataacaggttattttagtttctgttctgtggaaagtgtaaagcattccaacaaagggttttaatgtagatttttttttttgcaccccatgctgttgattgctaaatgtaacagtctgatcgtgacgctgaataaatgtcttttttttaaaaaaaaaaaaaaaaggggcggccgttttaaagaatccttggaggggccaaagtttacgcgggctggcaagngaatagttttttccttatagggagccgaattataagctact

SEQ ID NO: 35922 - DNA, 429 bp, Homo sapiens
cccacgcgtccggaaatatctccctttgctccagttaattgttcttgtatgtaagttgctttctattccagtatatccagagtggtgaaataacaaggccagccacgtagccaaaggtcgctccaagcgtacaggagatgggccatacctgaggagagaatgtatgagatcaaaaaagaacaaatgttttattattacttgagcacaagtgtaacctaaatatttctatattaaagcttaatgtgctttcttaaagaatgccaaaagtgtaataaggtcataactgcatttatcatgaacactaaaaatgtacacattttagttaatgtgcattaaactgtaacaaggcttctggcaattgtagatttagtttgacgctccccaaagtgcatgagacacatgctaaaattacaaattaaaattttgggg

SEQ ID NO: 35923 - DNA, 398 bp, Homo sapiens
cttgactccgctgctcgccatgtctttttacaagattttcaggattaagcgattcctggccaagaaacaaaagcaaaatcgtcccattccccagtggattcggatgaaaactggaaataaaatcaggtacaactccaaaaggagacattggagaagaaccaagctgggtctataaggaattgcacatgagatggcacacatatttatgctgtctgaaggtcacgatcatgttaccatatcaagctgaaaatgtcaccactatctggagatttcgacgtgttttcctctctgaatctgttatgaacacgttggttggctggattcagtaataaatatgtaaggcctttctttttaaaaaaaaaaaaaaaaaaaaaaaaggggcgcccttttttaaggat

SEQ ID NO: 35924 - DNA, 412 bp, Homo sapiens
gaagaggaagggcagcggctgggtgtgctccgcaaggccatggcccgagggcagctcctgctgcagagagacctgggctccctccctgcggcagagccaccccctgcacccgagtcaggcctagaggacaagctcagtgagcgcctgggggaagcctgggcaggccgaggggctgcctggtgggagaggcagcagggcaggacctcggagcccgggagacagaccaggcggcccaagcgccggacccagctgtccagcagcttttcgctcagtggccatgtggatccctcagaggacaccagctcccctcatagccctgagtggccacctgctgatgctctgcccctgccccccacgaccccgccctcccaggagttgactccggatgcatgcgcccagggcgtcccatcag

SEQ ID NO: 35925 - DNA, 378 bp, Homo sapiens
  misc_feature (1)...(378): n = A,T,C or G
cccacgcgtccgcccacgcgtccgcccacgcgtccgctaaaagcctgtatttagctctctatttaatatcttaccttctcttctcctaatgacttcctcattgtcctccaattatagtgcccatcatctttagttgtttactcaaacatcactcttctagattataaacctacatgccatatggactacgatctccccattgctttttgttttctggaacactttaccagctgacttgtttctggcaggagagtgcatgatgcattggagaagatgtaagaaagccagttggctggagtgttgagaatgaagggagcactgttgtgaaataaagccagaatgggagttagggacccaactgtgcagacccttgtaagn

SEQ ID NO: 35926 - DNA, 379 bp, Homo sapiens
  misc_feature (1)...(379): n = A,T,C or G
aaagaggaagcatttcatgttcaataagaaacccagccattccgcatggctggttcctgagtggctctggtgatactctccagccacctgctgacattcagaatctcagacctcgggactgctgttgcggtaccgtgtgtctgacacctgccagcagccctttgctatctgcgcgcaggatgggggtgactgcccagacattcccgctagataggctctgatttccggggcagcctttcagatgcggcagacatacaacacctgtactttagagttttaagggaaaaaaaaaatcagaagtgctggctagatagtaaaaacttaggataacttagaaaggctagttttagcttcctttgtggctccctggtgcaaaacn

SEQ ID NO: 35927 - DNA, 179 bp, Homo sapiens
agtttgttgaaatgctatggggctttgtacttatgtgaagacatgtgagtatatcttaaatcaaattcctttcaactatttcaactatttttacagacatcatttactgagaggacaaaagggtaatataataaaaactgccatggggggagagaaaggttgtaacttacaagcagtat

SEQ ID NO: 35928 - DNA, 429 bp, Homo sapiens
actaaattaggcaaatagtaatgtcccttttgccaaaacgtggtggttagagatgatgggcttgctgacttctaggttagttggtagagatgcattaacctattctcattcagaaaccagactgtgatgactgggagagcgggctgaatgcaatggagtgtgcattacatttggaaaaaaatgtgaatcagtcactactggaactgcacaaactggccactgacaaaaatgacccccatgtgagtattggaaccccaggaaataaatggaggaaatcatttgccttatggattgggaaagctgcccactaactgtcttccccattgttttgcagttgtgtgacttcattgagacacattacctgaatgagcaggtgaaagccatcaaagaattgggtgaccacgtgaccaacttgcgcaagatgggagc

SEQ ID NO: 35929 - DNA, 380 bp, Homo sapiens
tgggattacaggcatacaccaccacacccagctaatttttttgtatttttgttagagacagggtttctccatgttggtcaagctggtctcgaactcccgacctcaggtgatccgcccacctcggcctcccaaagtgatgattttatttttatttttaattgtattaatctgcatctagataatgactttgtgaagggtgtgtgttgcgtgcaaaacttaaggtattggttgagagttaaatacattatttttataatatggaggggatagtctaggtactaatgattttttttaagtacttttataaaaagttcatttttaaaattgtttgtttttaaaagccaatatacgttgcagaattaggaacagtatttatattt

SEQ ID NO: 35930 - DNA, 423 bp, Homo sapiens
gcgctaatcatgcctattaaggatgtaagacattacagccttataagaaagattgtgaaaagctggggagaaaatgcttaaggacatgctaggggaaaaaaaagtaaaattgaagtgctattgcagacatggctgcagtactgtaccttatcattctgatgaaactgatttggagcacccttttctttatcgctacatttatttaggggacaaactccatccaggttgactctctctggaatgcggtaataagagctggcaagtaaggctcaaagagaagcaaccaactggagttaattgcccatttgggctctttgtataattatggcaaagtagacatttatgttctaattaatatgattacagagaaggctttttctcaggtcaggcttttcatgaaagtattttgagaacaatgaattg

SEQ ID NO: 35931 - DNA, 422 bp, Homo sapiens
acagtttcaggcacgtgatttctttagcttgatggagaacatggtgtcccggcgtggaaacagtatggggaattcagtccagagcccccagatttccagaatcgagtgagcttcctggaaggagactgcgtcttctctcaattccagtcatctcagtcgttgtcgttaggtgacatgtgcactttaaatgctctcatcggttggcttcattttcaagacaatcaaatgtattgactgttttcttcttagaaaatggagagggttcaaaacatgcaaactgccactttcaacctttgccagtattccctctacccccgtgagagctatctggggggaagaatccttaccaaggtttttttggaaaggtacgaatcttaacttttttccccttctgtgtctcagggtaatactattcagagtcg

SEQ ID NO: 35932 - DNA, 413 bp, Homo sapiens
aaattagaagcagtagatctcatggagccacgtttaatatgtgtagccacagtaactcgaattattcatcgtctcttgaggatacattttgatggatgggaagaagagtatgatcagtgggtagactgtgagtcacctgacctctatcctgtagggtggtgtcagttaactggatatcaactacagcctccagcatcacagtgtaagttggtatacagaaaaggtgtccttttgtaaaaatcagcaattctccagaggactatctcacataagtcatcttatgagctcacaggacaagaatatacctatgtctgattggttgccaggtaagacattaagactcaacaacaatatcacagaatcagaccatgtgtcccatggcaatgtgaatccaatagtcaattacataatga

SEQ ID NO: 35933 - DNA, 407 bp, Homo sapiens
ctgggattacaggcgtgagccactgcacccagcccccttttttctaaacagtaattgttacctaactcctacctggagatgggaggaaaaaatttttgtttaaaaagagaagaaacctaatttttgtctttacttcctttggaatgatctcagtgaccacagttaagaatccatccctgccagcatcattgatgaaggactgcagaaaagacaagaagatatctattattattattattttttttgggattgagtctccctctgcactccagcctggccaacagagcgagactctgtctcaaaaataaacaaataaataaataaataaataaccctacagtgacctctaagtgttcaagagaaaggaagagtttcatgtcttttactttcaacagaaagctagaaat

SEQ ID NO: 35934 - DNA, 388 bp, Homo sapiens
  misc_feature (1)...(388): n = A,T,C or G
aaagatgtgaaggggaggngaacacacgcttcagtctaaaacactaagtagatgcaggcctgggccgtgctcatacccccgggaaccatatcttacccattgtatgtcgcagcttgcaggccagtgcttggcacagagcagggactcaggaagcctttgtcactaaagtaagagcctctgcggagtacagtgcatggggtcggctgggacagccccaggcagcagatcctggtattgggctgaggaaagagcactgcgcttggagtcagtaagatctgccacctccctgagtctcatcagcaaaatgaggataaagataaagatactatagttgcccagcctgcttgacagggttgttggaaggttcacataagatgatgatatgcaa

SEQ ID NO: 35935 - DNA, 417 bp, Homo sapiens
  misc_feature (1)...(417): n = A,T,C or G
caaacagctgggcgcttactcaccaatcgtccttttaaacaccctccttttcttcaataccaaatacttccaactaaagaatgttactgagcacttgaagctttcctttgcccatgtgatgagacggaccaggactctgaagtacagtaccaagatgacatatctgaggttcttcccacctttacagaagcaggagtcagaaccagataaactgactgttggcaagaggaaacgaaatgaagatgatgaggttccagtgggggtggagatggcagagaatactgacaatccactaagatgcccagtccgactttatgagttttacctgtcaaaatgttctgaaagtgtgaagcaaaggaatgatgtgttttaccttcaacctgagcgctcctgtgtcccgaatagccccatgtggtn

SEQ ID NO: 35936 - DNA, 421 bp, Homo sapiens
cggacgcgtggggtcaagatggcgggagcagctacccaggcttccctggagtcggccccacggatcatgcggctggtggccgaatgcagccgctccagggcccgggcaggcgagctgtggctgccgcatgggacagtggccactcctgtgttcatgccagtgggcacgcaggccaccatgaagggcatcacgaccgaacagctggacgctctgggttgccgcatctgcctgggcaatacctaccatctgggtctaaggccgggacccgagctgatccagaaagccaacggtctccacggcttcatgaattggcctcataatctgctaacggacagacggcggttccagatggtgtcgctggtgtctctgtccgaggtgacggaggagggcgtccgctttcgctccccctacgacggcaatg

SEQ ID NO: 35937 - DNA, 438 bp, Homo sapiens
ctcaagtgcgtggtggtcggcgacggggcggtgggcaagacgtgcctactcatgagctatgccaacgacgccttcccggaggagtacgtgcccaccgtcttcgaccactacgcaggaagactatgaccgtctgaggcctttatcttacccaatgaccgatgtcttccttatatgcttctcggaggtaaatccagcctcatttcaaaatgtgaaagaggagtgggtaccggaacttaaggaatacgcaccaaatgtaccctttttattaataggaactcagattgatctccgagatgaccccaaaactttagcaagactgaatgatatgaaagaaaaacctatatgtgtggaacaaggacagaaactagcaaaagagataggagcatgctgctatgtggaatgttcagctttaacccagaagggattgaagactgtttt

SEQ ID NO: 35938 - DNA, 436 bp, Homo sapiens
cccacgcgtccgaaattacttttggttaaaatttctcctaaatgtgctacagagtgcaaactctgtctccctgccattccgctatatacttactaactattattttattcaagatcatgcatgctctacttgaaggtctatttctatcttttcaatgctacccttacccactagcctaatcacattattcctattttcaacatctaggaatcaattacatagtgaacatgcctaagaaataataatctgggcagatgcagtggctcaggcccgtaatcccagccctttgagaggccgagcgggtggatcacttgaggtcaggcgttggtcaagtgctcctagagaaccaggctgaccaacatggagaaaccttgtctctactaataatacaaaaattagccaggtgaagtggcaggcacctataatcccagctatg

SEQ ID NO: 35939 - DNA, 428 bp, Homo sapiens
catccttatgccgagtgtggcaaaggagtacccactgcacaaatgtcatcacctgaaggctttcatttatacagatcattgatcaatttaagaacttctgaagggtgctaaacacaactctatcctgctgggtaagctggccggaagttcaggggctctcacattacaacatgaattagattaaactttaattttcccgataatggctgtgagagactgcacatctcccagttctgtgccttaattatttgactttcttgataggagtgaagatagtatctcaccttggaacggggcacagaaggcagtagatgaccacgatcgttggcaataatttgagtgtagccttcatgagaagagatgctctggggtacaagtgggagagataaaggtttgtgaggggaaaaagggaagcatttggtgagctt

SEQ ID NO: 35940 - DNA, 455 bp, Homo sapiens
caaagttcagcattcattttgaattgagaagcctatacatttagctgacaaagtgcttatagaatttcttaacaactgaaccattcaaaaggattttttttgtttaaaactggatttcaatgtaagcaaatgaagaaaaaaatatagatttcatttccatagcttcttatccctgtattgaggtaataaattgttttactgacaatttttcctttttctacactaaaacaatatgtgatatatttcccctcttgaagaggcaattcattaaactctcaaattttctatagaatcaagatagaacctttagatactccaactcaccaaaatgtaaaaaaactaacaaaaatatttggtcttcaataatgctaaatatctacatttttagaatttatcaacatttaactagataattgggcatgtcttaattatgcatgtacttatccatactaata

SEQ ID NO: 35941 - DNA, 426 bp, Homo sapiens
aggaaagtctgatggatttggggatttcagctgtttaaagatatgtggcaaggacttgaaatgcggtaaccatacatgttcgcaagtgtgccaccctcagccctgccagcaatgcccacggctcccccagctggtgcgctgttgcccctgtggccaaactcctctcagccaattgctagaacttggaagtagtagtcggaaaacatgcatggaccctgtgccttcatgtggaaaagtgtgcggcaagcctctgccttgtggttccttagatttcattcatacctgtgaaaagctctgccatgaaggagactgtggaccatgctctcgcacatcagttatttcctgcagatgctctttcagaacaaaggagcttccatgtaccagtctcaaaagtgaagatgctacatttatgtgtgacaagcggtg

SEQ ID NO: 35942 - DNA, 397 bp, Homo sapiens
  misc_feature (1)...(397): n = A,T,C or G
cacgcgtncgatggcgaactttcttcctagtgtcttaacatttatgaacttatgtttgacttgaggggcatttcagcaaagctgtgaggaaaagtaggttctggactgatgtctgctttgtgccatagacattttggaacataaggaagtatctgcttctactatatgtacaggacttgtccccaaataatttctgaatcccttaatgcagttgagaatcccttaatgcagttgagaacagtaaagttcatgaccataccgaaaagcacttttaagttcacttctttttaaatatttttttagaatttattttttaaaagcatatgtaactagtgatgattttagcattagctttacttggaggggagaagaaacaaaattacaccttanactctat

SEQ ID NO: 35943 - DNA, 381 bp, Homo sapiens
ttgctaaagacttgtttcagattatatcttagatttaacataccacttggtattactggagttttactacattgaagcttaatcttcgtatctgtaatttagtgttgctcccacgtactgtgctgtaggtctctcatttccttgcctgaataaaaaccccaagttagccatgtaaaatttttgtctttctagactatcttatatttctcttttgttttctacaatattccagttactagctaaacaaagaatagtctttgagaaagagtgcttttgctctcaattcagacatttgtttaaaaaaaaaaaaaaagggggggggggatccttgctattttgccccaggctagccttgaacttctaggctcaagtgattctccg

SEQ ID NO: 35944 - DNA, 405 bp, Homo sapiens
  misc_feature (1)...(405): n = A,T,C or G
ctcgaggccatgagcagatataccagcccagtgaacccagctgtcttcccccatctgaccgtggtgcttttggccattggcatgttcttcaccgcctggttcttcgtttacgaggtcacctctaccaagtacactcgtgatatctataaagagctcctcatctccttagtggcctcactcttcatgggctttggagtcctcttcctgctgctctgggttggcatctacgtgtgagcacccaagggtaacaaccagatggcttcactgaaacctgcttttgtaaattacttttttttactgttgctggaagtgtcccacctgctgctcataataaatgcagatgtatagcaaaaaaaaaaaaaaggggcggccgttttaaaggacccttggggggccccaacttan

SEQ ID NO: 35945 - DNA, 406 bp, Homo sapiens
  misc_feature (1)...(406): n = A,T,C or G
caggctggtcttgaactcctgacctcaggtgatccacctaccttgacctcccaaagtgctgggattacaggtgtgagccacctcgcctgacccaatggcaactcttttataactgttaactatgatacacttagactgtgctcacagagagaatgcatgtgacactgtgtatgtaatggaaccttgaatgcatgcacacacagacttcagacagtatagtaaaaacggaagaattcagcgaacaccagtcagatgaggcatgagattatcacaggtggaaactagcagaatacagttataacatatgccaactatccagcctgggcgacagtgcgggactccgtctcanaaaaaaattaaaaaaggaattttaacccggggttgtgcgtgcttttttaaaaaacaa

SEQ ID NO: 35946 - DNA, 263 bp, Homo sapiens
tctgtaaggtcggtttctacactgagcgcaagggctgactacgctgtatttcacaaccgagccctagcgccagctcagcaccctacgctcagtgtagaaacccacgtctgtaaggtcggtcttcgtccatctgctttttttctgaaatacactaagagcagccacaaaactgtaacctcaaggaaaccataaagcttggagtgccttaatttttaaccagtttccaataaaatggtttactacctgaaaaaaaaaaaaaaagg

SEQ ID NO: 35947 - DNA, 410 bp, Homo sapiens
atctatctgaagaggaaaaatattaacctcctgaggtatttcttgcccagctgggtccaacacttgttcagttaataagtattaaatgctgccacatgtcaggccttatgctaagggtgagtaattccatggtgcactagatatgcagggctgctaatctcaaggagcttccagtgcagagggaataaatgctagactaaaatacagagtcttccaggtgggcatttcaaccaactcagtcaaggaacccatgacaaagaaagtcatttcaactcttacctcatcaagttgaataaagacagagaaaacagaaagagacattgttcttttcctgagtcttttgaatggaaattgtattatgttatagccatcataaaaccattttggtagttttgactgaactgggtgtt

SEQ ID NO: 35948 - DNA, 437 bp, Homo sapiens
  misc_feature (1)...(437): n = A,T,C or G
cccacgcgtncgccaacccactgagagaagatgcctgggggtccaggagtcctccaagctctgcctgccaccatcttcctcctcttcctgctgtctgctgtctacctgggccctgggtgccaggccctgtggatgcacaaggtcccagcatcattgatggtgagcctgggggaagacgcccacttccaatgcccgcacaatagcagcaacaacgccaacgtcacctggtggcgcgtcctccatggcaactacacgtggccccctgagttcttgggcccgggcgaggaccccaatggtacgctgatcatccagaatgtgaacaagagccatgggggcatatacgtgtgccgggtccaggagggcaacgagtcataccagcagtcctgcggcacctacctccgcgtgcgccagccgccccccatgcccttcctggacan

SEQ ID NO: 35949 - DNA, 429 bp, Homo sapiens
  misc_feature (1)...(429): n = A,T,C or G
cccacgcgtccgtacaaaatcatggtgacacttccaattaagtgcactaaatgaaaagttaagtcacttattaacttttcagtttggtttgcaatgagaaagagtggaaatttgtattttgttttgcttatagaattacagacatgttgaggaagtgttgagctttattttgctttttcatagaggcagaaagtaggaaccagatagagatgaaaaggggccactgaaaagtgaatttgatagctcagcatttaagcatgattacatattcagatagctctttttgctttctataaatatatgcattgtgtgtgtagtaatagatgtaagtttacactttgaaaggaaatcttgtttcaatgtttattataaaagccttgctaatttagtagtgatgctttccttggttgtacaggtgtacatttgtan

SEQ ID NO: 35950 - DNA, 436 bp, Homo sapiens
tcagcagccccgacagccgacagtcacagcagctctgacaagagcgttcctggagcccagctcctctccacagaggacaagcaggcagcagagaccatgggccccccctcagccgctccccgtggagggcacaggccctggcaggggctcctgatcacaggtcccagtattgactgatgctgtcttcacctcctagcctcacttttaaccttctgggacccgcccaccactgtccagttcactattgaagccctgccgtccagtgctgcagagggaaaggatgttcttctactggcctgcaatatttcagaaactattcaagcctattattggcacaaggggaaaacggcagaagggagccctctcattgctggttatataacagacattcaagcaaatatcccaggggccgcatacagtggtcgagagacagtat

SEQ ID NO: 35951 - DNA, 448 bp, Homo sapiens
ctgaatcttcaccgctgccctatgaggaggctattgttactctccccattctatagatgaggacactgagccacagattggttgagtaacttgctcaggctcacacaactagcaggtgataacagctgaggtgaaagaacattttttctgggaagatacagggtgtttaaaggtacctgtttagtgcacagcaagttgcagtacttttaaattggagactggaatatgtaagtagatgtttgaatctctctctgtctttcagtgttacaggtgaatcaacaaaattagaatatctttctatttagtgactgaagaaggcggtccatgcatatatcagatctagtttggagtcacagactagattctggaccagagatgaaagatatgctttgggtacctctttttgattaaatgtagtttttaaaatagtgacttgactatacctcag

SEQ ID NO: 35952 - DNA, 419 bp, Homo sapiens
gcgcggccctgagggggtgtgttgcaggggtttccaagcccagcaccagcacccttgcccttttccatcaggggttgagcctagggtccccgctggcgggcggctcccgagtcttggagaagagcgcgagaacctataccgcccccgaagtgcggagaccccctgggcaggctgaaagatggcggcggcgtctgtctctgcggcttctggttctcacttgtcgaacagctttgctgagccatcaaggtctaatggaagcatggttcggcattcttcatctccatatgtgagatatccttcggataagcctttccttaatagtgatctacgacgctccccaagtaagcctacacttgcctatccagaaagcaacagcagagccatattttctgctcttaagaatcttcaagataagattc

SEQ ID NO: 35953 - DNA, 404 bp, Homo sapiens
aaatctttcatctctaaaatgtgagtgtgcactggtgaatcaaaccatgtaaatgaaaataagtaaatagaatgaatcctcccttttcacttgttttgaggttttttgcttgttttgtttggttttctgccttattatacgtggcttatgtctggttttggtttctctgtttgctgtcagtgctggtctggaaactatatctatctatgcttaagcagttttcagtgtcctctcaggttgttgatgaacttctggatcttgtttgagagactatttcaatgtttttcaaattcattaatgatacatttcaatgagcatgtcagtaaaagttatcagtaagagaaattaaagttccttttttgtcagtggttcttatttgaacaaaagtgagttacaagaataag

SEQ ID NO: 35954 - DNA, 436 bp, Homo sapiens
tcaggagttcgagaccagcctggccaacatgatgaaatctcgtctctactaaaaatataaaaattagccgggcatggtggcaggtgcctgtaatcccagctactcaggaggctgaggcaggagaatcacttggactgggaggcggaggttgcagtgagccgagatcacacccctgtactccagcctgagcaacagagtgaaactccatctcataaaaaaatttttttaaaaacattagcaataaaaggaggcatactttaggtatcatttggaaaaacttaattagtgaaagactcttccaactgggggcatcagagagggaattttggaggagacttgctttgcacccccagggctagcagggaggtagaaattgaaggtggagggagcagcaagggctggaattcgtctgcagcattgctggagtaaacagtag

SEQ ID NO: 35955 - DNA, 422 bp, Homo sapiens
  misc_feature (1)...(422): n = A,T,C or G
caatttttgataaactagaattgtttaaacaatatatatagtaagaattattatacaggaaaatcctctagcatatatgtggaaacttaacgagaaagtaatgagtcttggtgttattaccagaatgctaatataacatgatatatttaattaaatatgaaagaattaaaatagaattgtaggtatagtttgctagcattttcttttttttaaatttttttgcttgtaatgttatattttctaatggctataaagaaacatggtcaaatttaaatttctctagtaaagttgattcccaatttgatagtagcatgaatatataattttgttttggatttttttgggttctctacattattttataaataattactaaacgaagatttggcacataaattgtgtagcagggtacttagcttccn

SEQ ID NO: 35956 - DNA, 423 bp, Homo sapiens
  misc_feature (1)...(423): n = A,T,C or G
cggacgcgtgggcgtctcccctctctggagccgagagaggccggtttcccccaccatagcagggcttggagaaagggatggggagagtccctcctgccactgacccaggatggataaaagtacccctttcatagaaggaagaaaatgggaacaaaggtgctgctgatcatctgaggttgcctgcatggcagtgaagaacatggacctttgggtagcccacctgggaggaattttccagagatcactgtctgatgaccctgtcttggaattggagccatgcaagttacactgaccacgtttgggttgggatattgaggaggttatggttaaaagcatacgatgggagatcatattgtacttgcgagtgagacccggctggaggaatgttttaattcttcggaaataccaagtggtctctgtctn

SEQ ID NO: 35957 - DNA, 428 bp, Homo sapiens
  misc_feature (1)...(428): n = A,T,C or G
gcgcctataatctctgtcatctcagctacttgggaggctgagtcaggagaatcactggaacctgggaggcggaggttgcactgagctgagatggcgcctgggtgacatagggagagtccatctcaaaaaaaaaaaaaaagaaaccctcaaatcagccgtgcgactttgcctgcctgtgcctaagtttccttggggggaaaatgagtttgctgctgtgaaaatgaaatgagacactaaagctcaaaccccacccctggggtggggccagcacagtgagtgtcctctgataagctggtgtgcctgaattttaaggccctttcctccttctttttccttctccccacaacccttttggttcattcattcattcattcacctgttcattcagcaaatgctctgtatggcaagcagatatgactcagaatctn

SEQ ID NO: 35958 - DNA, 476 bp, Homo sapiens
  misc_feature (1)...(476): n = A,T,C or G
ggtagcannannannnaaactgaaaggcttgngaatncttccagaantcccgggncgacccacgcgtncgctgggccactgaattgccaactgtgtgacccaaggctcctctaaacctgcaaaaatggaaataataataggaccaaactcagagggttgtcaagaaaattaaatgagataatgcaagttgagcacttgggatggagtgtctggtttgaagcaaaggctggctaaatgaccatctgattattgctttggcccctgaagcctcgccatcaatttgttctctcattcatcagaacagccctttgcttggaaaaccatacttataaaaatatgaagcatcgtaaatgatcataaggaaaccgaccgggggaaggtagcaatgatgggaatctctaaggatctctcccaggagaatctgcctaggggttttagtggcctgaccctggggaggcaggttggagaaaactgtt

SEQ ID NO: 35959 - DNA, 416 bp, Homo sapiens
  misc_feature (1)...(416): n = A,T,C or G
cattgttacacttaattttacagggcacaaattatggaattacttcataaattcatggtaatgttttcataaattattgcattaacatacaattgccatttaattatgaagtccatcagtattgacagaagatgttacagtgaagtgctaaaaccacactatatggtaattatattttgggttatgtagtaaatcaaatatgcatgtcattgtgacactttatgtgttaaaacatggtagataatcacattttctgggccctgtaaaatagtgttactgtaatactctgttttgcctcctgccttgtttacattaaacaggatatttggtaaatttttttgtattgaaagttgtgtaggttactgacagtgttaccagcgtctggaattcttggtccctccgtggagaaactcttn

SEQ ID NO: 35960 - DNA, 405 bp, Homo sapiens
cccacgcgtccgggaggaggagtcacagagcagtagcatctatcaccagaatgacatctggacacccacagttacctttgctgacttcatcaacaatgaaaccctcttaggagaggatctggtggcttgggtcacagccagcttcctgcacattccccatgccgaggacatcccaaacacagtgactctggggaacagagttggcttcttgctccgaccctataacttctttgatgaggacccctccatcttctcccctggcagtgtctactttgagaagggccaggatgctgggctctgcagcatcaatcctgtggcctgcctccccgacctggcagcctgtgtcccggacttaccccctttctcttaccacggcttctagtactgagggtgtggcgggcggcg

SEQ ID NO: 35961 - DNA, 435 bp, Homo sapiens
cccacgcgtccgacaggcgttgagcctctgcacccagccaagaaacttgttaaaatgaaaattgggtctatgtagactgggagattaaaaatgactcctttttaatgtaaggaactttgctttactgtttcattaaaaggtttgccagtgcaaaccgaaaatgtaggagccctttttcaaaagcaggaacaaaaacaacctctgctgtgaaaggtactaaaataaaagccgctttttttcttctgcagtctctcttttgacttgtcacaaggcttttaaaatcattcttattcgctatttaatgccactctaagtaaaggaaaattaaaattttaaattgttagcatgaatcttaccgttcatctttatattgtgcaaagccagctttaaacgaaaatataagagcatttaatttgtatgctaaattgttccaaa

SEQ ID NO: 35962 - DNA, 420 bp, Homo sapiens
  misc_feature (1)...(420): n = A,T,C or G
taaagaccagtctatgaaccagtgagcatgggtagatacattatactttgcccagtaaaacatgtaagattgccagtgatcagatttttaaacctgctaatattttacaaaatttatatatcacaccattttaaaagaaccactctcttccattttggaataatccttgctttcaggtgtgctgtgtgcgcatcctcatgtctgcatttatactttctttcctagtcttcaccacacccaagaactgctctatgagagcaccaaagattttctgcaactcagatctgaaaaccaaaataaagagaagtcatggatgcttgaaaaagataatttgatgtcaaagattaagcaatatagggtgcagtgtaagaagaaagaagataaaattggaaaagtgttgcccgttatgcatgagagtcn

SEQ ID NO: 35963 - DNA, 415 bp, Homo sapiens
aaggttgtaagttgcatgtgcacctgaaactcgtatatgagtattttctgtctgtgcttttacagaggaggaattctgtaacgacttttgtttcgggttaggaagagaatgatctctttcagtgcaccgccacttatgttacctttttccttttatttctttgtgtgtccagctgcaagaacagcaaggaaaaggaagccctctccagaaccagaaggtgaagtcgggccccctaagatcaacggagaggcccagccgtggctgtccacatccacagaggggctcaagatccccatgactcctacatcctcttttgtgtctccgccaccacccactgcctgacctcattccaaccggaccacaccgcctgaagcggcccagaatggccagtcccccatggcagccctgatcttag

SEQ ID NO: 35964 - DNA, 410 bp, Homo sapiens
  misc_feature (1)...(410): n = A,T,C or G
cttggacataaaagccaagccacccatttgcttttaatccaaagaacatgtatagtttttgtacccagagactatgatttatattgattgcacttgcctgccatgatttagataagattttttttgcatggtttttattctttcctaatggatcctgttttataatacttccaagcctgtccatggatatatcaaatgtcttcacttgtatattttcatggctaggtatttctaatgtttattcttccctgtgtacttctacacatagctatgcactatgaaaattaaatggaatgaatgatatgtatattactcaaaataaagtttctttcacttttnanaaagaaaaaaatagaaaaaaaaaaaagaaaagaaaaaaaaaaggaaaannttccctgcgcgcgtctacc

SEQ ID NO: 35965 - DNA, 421 bp, Homo sapiens
  misc_feature (1)...(421): n = A,T,C or G
agaagacctggtgttggccacaagtctcagtaatggaaggcgtgtggtcccttttgcttctttgattaaaaataaagtaaaactcattggagatgattgtgggtatttcagcaacccaagaaggacacttaggtactgtaagtaatttgaaaagtaagatacttctaggattaagagccgccatggccagggcatgaacaggagacctgtgatcatgtaaccgtaattggtaataagggctcaagacccattcagattttttagaccagatgctcaaagcagncatctctctctagtttgtactgttatggggggactttgtgagagaaggcaggtaatgaaatgacccctaagtgtacctctttctcacagctcctcgggtttctgtattttcctacaggatccttcctgatcctctgtn

SEQ ID NO: 35966 - DNA, 399 bp, Homo sapiens
cagaacacaggtgtcgtgaaaactacccctaaaagccaaaatgggaaaggaaaagactcatatcaacgttgtcgacatatggacacgtagattcgggcaagtccaccactactggccatctgatctataaatgcggtggcatcgacaaaagaaccattgaaaaatttgagaaggaggctgctgaaatgggaaagggctccttcaagtatgcctgggtcttggataaactgaaagctgagcgtgaacgtggtatcaccattgatatctccttgtggaaatttgagaccagcaagtactatgtgactatcattgatgccccaggacacagagactttatcaaaaacatgattacagggacatctcaggctgactgtgctgacctgattgttgctgctgggg

SEQ ID NO: 35967 - DNA, 402 bp, Homo sapiens
acgcaaggcttcgattaacatgctgaggattgtagagccatatattgcatgggggtaccccaatctgaagtcagtaaatgaactaatctacaagcgtggttatggcaaaatcaataagaagcgaattgctttgacagataacgctttgattgctcgatctcttggtaaatacggcatcatctgcatggaggatttgattcatgagatctatactgttggaaaacgcttcaaagaggcaaataacttcctgtggcccttcaaattgtcttctccacgaggtggaatgaagaaaaagaccacccattttgtagaaggtggagatgctggcaacagggaggaccagatcaacaggcttattagaagaatgaactaaggtgtctaccatgattatttttctaagct

SEQ ID NO: 35968 - DNA, 407 bp, Homo sapiens
  misc_feature (1)...(407): n = A,T,C or G
cccacgcgtccgtgtttaagtgccagactttgaggatcagctttaatttctccatttgtaatagctgggtatttaaactggaagcaaatagttttctttcttaacaattatgtgcagtgtgtgtcactgttttcttgctttatagatagagctggctttaagtgctaaaggacacagtagatttttgacaaacagtggctgctctgctgactatcttttaggaattcaggaagcaaatcacatagtgacaagtccttacagacaccacttctagtaaatctctgtaaatgtggatagaaagctcagtgtgaggcagtgcgtagacctaacgtctacctttacatctgctgttgaacctgggcactacctgttacagatcctgtcaggctgttgaactggaggtgtan

SEQ ID NO: 35969 - DNA, 417 bp, Homo sapiens
cccacgcgtccggccggaggagccagtatctgtgtcgtcgccgcccgtggcgtccccggtttggtgttgcggcgcccaccttcgggaggatcaggctgcttctgatgcttggaagatatcctctcagccacaaagatggtaataaatctttgcctcccacagttcagaccaagaattcactgcaacaagatatcagctgatggttacgaagtagaaaatctcatctctgaagatctcacaaagagaagtcatggtttcaggacagagtatttcattaagccaccagtctatgtgacagtttcatttccctttaatgtggaaatctgtaggatcaacatagacctcacagctgggggaggtcagaacgtcactggcctggaaatgtacacatctgcctcatctagcagagtgtcttgg

SEQ ID NO: 35970 - DNA, 440 bp, Homo sapiens
gcgcactgcgttccccaagtgagccaacagatctgaccactgttctcccacttgccatgaattgaatattatttctgaggccaatatacatgcacagaaattgaaaaatactgggatgactgggttaagcataagtaagcaatttgcttacaaaattacccaaagcaaatttttcttattttaaaggatttagttggtaagcaagaccaattatttaatttctatatctacacttacagcttaagatacacactttcctcatattatagtccaggtcttgacctaattatgtgactttgaataaatcccacatatctacagaatgtttcttccagctgctgtaacctagacctaggtagagagattttggcctcttctattaatatttagagaataatatatcagcataagtgtacatgtagaaacatgctgaataacta

SEQ ID NO: 35971 - DNA, 425 bp, Homo sapiens
cccacgcgtgcggtgagtgtggtagactcatctcctgtctcaagtccttcagctaagaaatgctctaaagtgcaagcaagatggcaaatgtctgcaagaaaggcccttcttttgtgggctcaggaacaatgcgccacctatgagtctgtcaatgtgaccgattttaagtcaagttggagaaatgggatggcttttttggccatcattcatgccttgcgaccagacctaattgacatgaagagtgtgaagcatagatccaacaaagacaatctgagagaggccttcagaattgcagaacaagaattaaaaatccccagattgctggaaccagaagatgtggatgttgttgatcctgatgaaaagtccatcatgacctatgtggcacagtttctgcagtattccaaagatgcccctgggactggaga

SEQ ID NO: 35972 - DNA, 407 bp, Homo sapiens
cccacgcgtccggttcagtcacattaaaatggacattactctaaccaaacccaactttgcaaaacacatcgtgtgggctcccgaagacttacttccagtacctttacctaaacctgatccagtgtcttcaatcaatttacctctgcccccacttatagctgaccagaggctaaatagattatggaatacaaaaagtgatcttcatcaaaacacagtgtccattgatccaaaattagcagccaaagccaaaattaacacaacaaacagagaaggctacctagaacaatttggagactcacacggttcaggagctaaattaggagatcctagactacaaaaaaattttgatcctaggcttcacagactgcccaatacagagtctcatcaagtggttatgaaggattcac

SEQ ID NO: 35973 - DNA, 414 bp, Homo sapiens
cccacgcgtggggaaactctgggatttctaaggaaggatgcagtgcagagacaggtcccagaggagacaagagctgagagaccatccaaactggggaccactttgtcactagacttcaaattttcaatatttatagagtgttttctaagagtcaggccctttgctgagtgctatgtgcagcaggatcaaaggcagccaggaggtagaggagtcttgaggtacatcagtcattggagttgaagagcagagattcaaaggaaagctggaactggagctttaaaggagatgtgaagtgggtgactcaacctctgactcagaaaaattgatacctgcagaagaaaaaacccggcgggcttaggactcccagctgagtgttgtatcctccatccccttccacctggtccctttattttc

SEQ ID NO: 35974 - DNA, 487 bp, Homo sapiens
  misc_feature (1)...(487): n = A,T,C or G
agagagaacccgcnccaaggaaagcccttgcggaatgatcgccattcccgggnccacccacgcgtccgctattattttaaatatagatctctttactgccagtagctttcatataaccctaccgactagatttagtcaccactgcttaattccaaaaaacaaaagctccatcctatatttactgtaaatcaaactctttgattgtattgcatgttttatttcaagaaaaaagctaacctgaagatttaattttaaataactacacatgttgtcactaatagaaataacaaataattatatgagaataacgggaattctcctaagttttgtggtaaatcttttggcaattttattgaagtataataaaattcaacaattcaatacgcctttataaatgttcattgtgatatacgacagctctatcacagtactagggtaaattttaattatatttattaattacagacgtgaatttcttcggagtaaa

SEQ ID NO: 35975 - DNA, 421 bp, Homo sapiens
caaaatctgttcaaaaggggactattctaacccagttgatggtcatttcttttcctacttaaagcttgggagtgttagcatgagaggcagtttgtgaaataggtgaggtcccaggctgggcattggggctcctcagccatcatctttcttttgccactaattgtcgagagggcttgctaatcagtgtttattcttcctgcctgcaactggaaacagcccttgcctattcctgtacagtgtgatgatactaaaccagctagggtagaagcacttgctttctctcagcaaggcatgtgctgcatagcctctttgaaagacagaagaataaattacaaagataaattaagcaggatctttgatttgaactcataacctggtaggggagccagatacattaatgaatggtaaaatatcatagttg

SEQ ID NO: 35976 - DNA, 429 bp, Homo sapiens
  misc_feature (1)...(429): n = A,T,C or G
cccacgcgtccgcggacgcgtgggggactgattaaatgtttcaaaagattgtgttcttcaattttggtgggttttgatttttgtttttttaactgcctctcagattatatttacttagtttaaatttctttgctttattcattaaagtataaaaacttcaggtctctgatatttattttcacttgtttactaattatttacaaaacaccctttgttgacttttattttataaatgtgtaatgtattaaacgtctttaaatttttgttcaactgaaactacattaactttgatttgctttactgggatttttttttaaagacactttttccatgtcagtgcgcagcacttaaccagtcgtttgtattccctttctttcaatccaataaacagaatgaatacctanataaaaaaaaaaaaaaggggcggcg

SEQ ID NO: 35977 - DNA, 412 bp, Homo sapiens
  misc_feature (1)...(412): n = A,T,C or G
gcaaaacaggaactggcaaaagtgctgcagggaacagcatcctcaggaagcaagcatttgaatcgaagctgggttcccagaccttgactaagacttgcagcaaaagtcagggaagctggggaaatagagagattgtcattattgacacaccagatatgttttcttggaaggaccactgtgaagctctgtacaaagaggtgcagaggtgctacttgctgtctgcaccaggaccccatgtgctgctcctggtgactcagctgggccgctatacctcacaggaccagcaggctgcacagagggtgaaggagatctttggagaggatgccatgggacacacaattgtcctctttacccacaaggaagacctcaatggtggctccctgatggattacatgcacgactcagataacan

SEQ ID NO: 35978 - DNA, 405 bp, Homo sapiens
gcgctaaaggtcaaccagccagcctcttttgcagtcagcctgaacggggccaagggggcgatcgatgccaaggtgcacagcccctcaggagccctggaggagtgctatgtcacagaaattgaccaagataagtatgctgtgcgcttcatccctcgggagaatggcgtttacctgattgacgtcaagttcaacggcacccacatccctggaagccccttcaagatccgagttggggagcctgggcatggaggggacccaggcttggtgtctgcttacggagcaggtctggaaggcggtgtcacagggaacccagctgagttcgtcgtgaacacgagcaatgcgggagctggtgccctgtcggtgaccattgacggccccttccaggtgaagatggattgccaggaa

SEQ ID NO: 35979 - DNA, 403 bp, Homo sapiens
  misc_feature (1)...(403): n = A,T,C or G
aaataataataataataataatagtactttacttcatagagtgggtatgaagactgagttcatatttgtgaagggcttaggatacttcctagtgtgtaagaaaggctcaataattacaaacagcactctgctttcttaatgagaaagagtgctattcctcacaatttaccatggatacaggctacacccttagaaccacaggcactttaactcttaaataaattattggccaagtagcttttccaacttacgtaaacacaagtatattaaagggccatccttacctagtttggaaggatcatactcagctgaaatttggatcaataatttctccatatggtggaagtttggaaattcttcaggaatgactgaaaaaacatttatattgccctccagatccacn

SEQ ID NO: 35980 - DNA, 491 bp, Homo sapiens
  misc_feature (1)...(491): n = A,T,C or G
gccccccccccaattgaacgcctgatttgaggccgtaagacccggctcgacccacgcgtccgcccacgcgtccgggtggagagtaagagaagaggctacacaggtgagaaggtgtcagatcacaaagggccttgtatgccaaactaagaagactgaacttgaccatgaagttaggcagaccctctggagagttttaaagcaaggagtcgtgtggatgaacaaacctgtgatgggctggggttaccaaggagggcttcctggaggaggtcagacttgagctgagggaaggataggatttggagagctgacattctgatgagcggcttcggttaaagctcacaaaaacccttccctcccccatgccctttgaaatcatttgaatcaaagattgcgtgtgttaaagacatgtttgtctgttatctgaaagctgtggtttctctttaacagattcagggcctcatcctttgactcggaccaagaaggattangag

SEQ ID NO: 35981 - DNA, 127 bp, Homo sapiens
aactggatacggagtttacaattccaatctctctatttctgggtgaagggtcttggtggtgggggtattgctacggtcttttaattataataaatatttattgaatgctaaaaaaaaaaaaaaaaag

SEQ ID NO: 35982 - DNA, 418 bp, Homo sapiens
  misc_feature (1)...(418): n = A,T,C or G
gcgcgatggccatagccagcctgaacggctaccgtctgggggacaaaatcttacaggtttccttcaaaaccaacaagtcccacaaataactcgctcatgcttttttttgtacggaatagataattaagagtgaaggagttgaaacttttcttgttagtgtacaactcattttgcgccaattttcacaagtgtttgtctttgtctgaatgagaagtgagaaggtttttatactctgggatgcaaccgacatgttcaaatgtttgaaatcccacaatgttagaccaatcttaagtttcgtaagttatttcctttaagatatatattaaacagaaatctaagtagaactgcattgactaaccagtccctctggatggtggtgaacctgaagcatgctttaacctctaagactgtctaacan

SEQ ID NO: 35983 - DNA, 398 bp, Homo sapiens
cagagaaatggtgctgggcttgcctgggtagtggtatgggcaggagatctgggttccgagctggctttgtgagctgggttcacacgtagttgtgtgatctctggttgccctgcacttcctggagcggcctctgtggaagggcttgggctggatctcttgagcctttcctgagcctattgaggttattaacttcagatgccttgcagaactgtccctgtagtcctggcatagaacaaagggtagatgcctgtaaggactagggtggttgggaggacagaggagtgctggctcctgcagaatattgacagaccctgcatagagccccagacactggcgatgtaaactattggcctaagcacttggattcctttgctcctacaaaccagcccaccaggcta

SEQ ID NO: 35984 - DNA, 428 bp, Homo sapiens
  misc_feature (1)...(428): n = A,T,C or G
cggacgcaagtgattctcatgcctcagccaccacagtcactgacactacaggtgcgtgccactatgcccagatgatttttgtatttttaggacagaccgggtttcaccatgttggccaggctggtctcgaacccctgacctgaagtgatctgcccgcctgcacctcccatagggctgtgattacagatgtgagccactgcgcctgccttgatttctatatgacatatcttttttgtccctcagatcctacattactgctttcttgtgaggaaagtaaatgtcttctatttttattttgagacaatatcttgctctgctgcccaggctggagtgcagtgacacaattgtggctcactgcatccttgacctcctggactcaagagatactcctgcctctacctactaggtaactgggactgcaggcatgn

SEQ ID NO: 35985 - DNA, 410 bp, Homo sapiens
tagccttcaggaatgtttcctcttttctgtggggttacctttgggttatcttctctattaagtgtggatccctgaaaaatggcataccctggtggtttttctagcccctgctgaaatcctttgaaggaatgtacttatttgtcaagattcgtctaaaaatgtggtctccagaaatgaacatagatgtgctgtgagctccttgcagttgtgattgcgacactgataattaagattggtttagttgttctgttgtacttcatcaaattgttgattcacattgaatttatcaaacgtcattctattctaaaatgtgaaagtatttttaacttaaatgtaggaattcgcatgtatccaggacaagtaaatttttgtgaaacattgcagatgttagatggatttgggagaatttt

SEQ ID NO: 35986 - DNA, 426 bp, Homo sapiens
cccacgcgtccgattttttgatgatgttttgtttgactactgtgttaaattctcaatagtcctaatagtttgtcatgtgattctcactctttcttgatagatgatcatatcattcacaatttattttccatttttagatcttatttattatatttttgcttaagccctttagagcagtggtgaataactgatgacttcaagcatcttgtctgaatcttgacattaataggaacgcttctaatttttacctttaaacctatagatgcttattataggtttctttcttcctttttttttttttttggggggcaaaccctccttttgtcccccaggctggagggcaggggggctttttgggttcattgaaccctttgcctccggggttaaagcattttttttgcctcacccccccaagtagcgggaact

SEQ ID NO: 35987 - DNA, 471 bp, Homo sapiens
  misc_feature (1)...(471): n = A,T,C or G
agagcggnnnnnnnttacggaaagccgctgaggggctcgaantcncgnngacccacgcgtccggcgggacctgcggccccgtcgcgaagtttccagccctgcgagcgccgccgggtcggccgatcgtcccccatacctcggccatgcggcccctgctgctactggccctgctgggctggctgctgctggccgaagcgaagggcgacgccaagccggaggacaaccttttagtcctcacggtggccactaaggagaccgagggattccgtcgcttcaagcgctcagctcagttcttcaactacaagatccaggcgcttggcctaggggaggactggaatgtggagaaggggacgtcggcaggtggagggcagaaggtccggctgctgaagaaagctctggagaagcacgcagacaaggaggatctggtcattctctttgcagacagctatgacgtgctgtttgcatcggggg

SEQ ID NO: 35988 - DNA, 446 bp, Homo sapiens
caaaacaccaaatggcggatgacgccggtgcagcgggggggcccggaggccctggtggccctgggatggggaaccgcggtggcttccgcggaggtttcggcagtggcattcggggccggggtcgcggccgtggacggggccggggccgaggccgcggagctcgcggaggcaaggccgaggataaggagtggatgcccgtcaccaagttgggccgcttggtcaaggacatgaagatcaagtccctggaggagatctatctcttctccctgcccattaaggaatcagagatcattgatttcttcctgggggcctctctcaaggatgaggttttgaagattatgccagtgcagaagcagacccgtgccggccagcgcaccaggttcaaggcatttgttgctatcggggactacaatggccacgtcggtctgggtgttaagtgctccaag

SEQ ID NO: 35989 - DNA, 473 bp, Homo sapiens
  misc_feature (1)...(473): n = A,T,C or G
gggaccacgatggccctgcggaaatgatagccatntgcgggnccacccacccgnccgaaaagtcctttcttctgattcaccaaaaaataaaatactgactaccatcactgtgatgagattcctataggctcaggaactgaagtctttaaacaaccagggaccctctgcccctagaataagaacatactacaagtcccttctgctaggacaacgaggatcatgggagaccacctggaccttctcctaggagtggtgctcatggccgggcctgtgtttggaattccttcctgctcctttgatggccgaatagccttttatcgtttctgcaacctcacccaggtcccccaggtcctcaccaccactgaaaggctcctgctgagcttcaactatatcaggacagccactgcttcatccttcccctttctggaacagctgcagctgctggagctcgggagccaagataccccccttgg

SEQ ID NO: 35990 - DNA, 459 bp, Homo sapiens
gtgcgggcgctgtgtcttatagaggcactgaccggcaagctgttccaggacgaccggcacatcatggactccctagagctggccaccggaaacccacagtacctgacagagctggcgcactaccgccggtggggggactccgtactcctcgtggacttaacacacgaggagatgccacagagcatcgtggaggccacctctaggcttaagaccttcaacttgatcccggctgttggcctaaatgtgcacagcatgctcaagcaccacacgctggtcctgacgctgcccaccgtcgccttcctggaggacaagctgctctggcaggactcacgttacagacccctctaccccttcagcctgccctacagcgacttcccccgacccctaccccacgctacccagggcccagcggccacccctgtccatggtgatggtgagacctcttctgaccaggccgag

SEQ ID NO: 35991 - DNA, 405 bp, Homo sapiens
ccgcccgcccgcggcggccaggaacccgaccgccctccgctctcaggatttttacctcctataactccaccagaaaagttttttctttcccagctgatgctggcacccccacgggaactcttcaaaaagacgcctcgccagattgcactgatggacgttggaaacatgggccagtctgtggacattagtgggcttcagttagccttggccgaacgccaatctgaattgccaacgcaaagcaaagcgagcttccccagtattctcagtgacccagacccggattcttctaattctggatttgacagctcagttgcctctcagatcacagaagctttagtcagcggaccaaagccacctattgaaagccattttcgaccagagtttattcgtccaccgcctccactc

SEQ ID NO: 35992 - DNA, 257 bp, Homo sapiens
cataaccaagcgctgtgaagaaggcaagctttgagaccttgaaggaatcatcaaactctgggcctcggtgtgctcacccagggcgagacaaagacgccatgctcctccaagtggcctccaagattaaatgagcaatgacttttaaaaaaaaaaaaaaggggcggccgttttaaaggacccctaggggggcccaggtttacgcgggcatgcaaagtaatatttttttccttatagggagccgtattatacactccctg

SEQ ID NO: 35993 - DNA, 409 bp, Homo sapiens
caacagggccctgggtagtcacatcttgtactcccctttgctgtcccggaggtagtggcaggagttgggccagcccccactaagtggcaggggaagactcacgattgggaagctacctctttgggaatcttggatgtggtgatctcaagttcccacaggccacctccttctggccactcactgctgggacccaggcacctcccttctccatcctctctggattgtcagtaatgtcctggaacagaagcctgtgggatggccttgggcacggagaagccctggggtcagtgtcgtgcacggatggcggcagtgttgaacccaggaggctgaacccggcccaccacggaagatgagtgcatggcaaccgcctgccttcacgtcgctccacttggtaaccccaaggtctggg

SEQ ID NO: 35994 - DNA, 408 bp, Homo sapiens
cggacgcgtgggcggacgcgtgggctggaaggtgggcttcacactcaggattgtgctttgagaaccagctaatagaccagccgagggaaggttgaattggctgtctttacttttcccgataagccctacttaaatgcagcctgtaattgtataaaggagatgagaaacatcaagagaaatgacatacatgtagctctggggtagcaagaactagacttcctcaatttggattccatttccttctgccatttgcttttaggcaattgagtgtgggtagtgatgagatatcaaatcccttagtgtttccattttgggaaatgaggcactattttttttttttaaaagacaacttacccacctgagtcctgaaacagtttgtctctccagttttctggcctatactttaag

SEQ ID NO: 35995 - DNA, 476 bp, Homo sapiens
cggacgcgtgggtcgcttaatacagaccaggaatttcccacttaaacctaaaaatcacttgttcttgctgcgtcttctgtacttggtttacctctttagtatcgttagtggaaccacaggatgtgagcagcattacttgtgccatgcccttgaataaaaatggcacttgaaggatcaacctggtaattacctggtaggttttgcttgtcctcccaccttagcattacctgaaggtggtagccagtagttttgtgcatgggtatgaaggcactttaagaaagatgttagtactgacttgtaatatgcaatggtgtaaaaccaattaagctgtgatgcattgtgttacaatatttttttaattttgtttagaagaattgtgaggcctttcagttaatttttctggaaaagcatcatgcatttttgcttttattattgtccactaatgatttgagaggagttgccaagctacttattgg

SEQ ID NO: 35996 - DNA, 401 bp, Homo sapiens
agttaaacagcttggttcttagcagactgcttaaaagatcaagaaaattttctcatcttttctttctacttagaaacattgcaagaaaccttggacagtcttcaccagacctgccatgattttataagatttaggcctcagtgacatgctcctgaaagtttcctgccagccatccaaactaagcatccactcattccatcttcccaaagtcactcaccgataaaggtagcatccttaagttcatttttgaaaggtggaggaggatctccccctgcccaaaggaatttttttatcagaataccttgaaaggggggtatataaatttggaaaacttaatttcttggctgtgtttgataacagttcctatgcatggtttttaatgtgaggtaaatttgtttctt

SEQ ID NO: 35997 - DNA, 422 bp, Homo sapiens
gcgagaagaaccggaagaaactgtccgagaagcccaaaccaaatgggcggactgttgaagtggctgagggtgaagctgttcgaacacctcaaagtgtaacagcaaagcagccaccagagattgacaagaaaaatgaaaagtcaaagaaaaataagaagaaatcaaagtcagatgctaaagcagtgcaaaacagttcacgccatgatggaaaggaagttgatgaaggagcctgggaaactaaaattagtcacagagagaaacgacagcagcgtaaacgtgataaggtgctgactgattctggttcattggattcaactatccctgggatagaaaataccatcacagttaccaccgagcaacttacaaccgcatcatttcctgttggttccaagaagaataaaggtgattctcatctaaatgtt

SEQ ID NO: 35998 - DNA, 406 bp, Homo sapiens
actgttgcgtgatactgaaactgtgctgctgtatactgagaaatggcacctgcgggattggcctacctgggagagaacctgactgctaaggcgggacatgatagatctctcttcctactgaaaggatactgtctagagaaaatacccattttttaaaagaaaccacactctgactaatttgagatactggttgctagcgagtactctggtttcaacagacacaaatttatatgttaacccagttttcttgccgttctgtaagtgttttattcttagtgtgatttttttccattgggatgtttttgattgaacttgttcattttgttttgcttgggaggaaaataaacaatttttcttttttcctttaggagcattatgagcattatgtcagaatagaatagaattg

SEQ ID NO: 35999 - DNA, 400 bp, Homo sapiens
cccacgcgtccgcccacgcgtccgatcatcagtaccgttagggtcagaaaagcccagcaatgtgtctcaggacaggaaagttccagtccctattgggactgaacgttctgcacgtatcaggcaaactggaacgtcagctccatctgttattgggagcaatttgtctacatcagtaggacatagtggcatctggtcctttgaagggattggtggcaatcaagacaaagtagactggtgtaaccctgggatgggaaatcctatgatccacagaccgatgtctgacccaggagtattttcacaacatcaagcaatggagcgagatagtacaggaattgtaactccttctggtacattccatcagcatgttcctgcaggctacatggactttcctaaagttggg

SEQ ID NO: 36000 - DNA, 405 bp, Homo sapiens
cccacgcgtccgcccacgcgtccgcggacgcgtgggccagatctgaattctacaaacacattgtgctttctggagggtctactatgtatcctggcctgccatcacggttggaacgagaacttaaacagctttacttagaacgagttttgaagggtgatgtggaaaaactttctaaatttaagatccgcattgaagacccaccccgcagaaagcacatggtattcctgggtggtgcagttctagcggatatcatgaaagacaaagacaacttttggatgacccgacaagagtaccaagaaaagggtgtccgtgtgctagagaaacttggtgtgactgttcgataaactccaaagcttgttcccatcatacccgtaatgctttcttttttcctttattgccaatctt

SEQ ID NO: 36001 - DNA, 383 bp, Homo sapiens
ttctgggttattaaaacctgcctagaggaactctctccttttggaccattttagtcactgttttcattctcaatttaagtattaacctgaattctaatttaataaattaacattacttgtttatataattgaattatataatatatacttgtgtctttttttgtatagcagttattggttaattacattgctgtatagtattctgttgattgacaaataccacagagtatttctttattttataactgatggacacctgggttgtttacatttttggacattattagttattctgggataaatatatttatctatatgtatgtcattagttttacatattaatttctgttagatatataattgggagaagagttgctgagatc

SEQ ID NO: 36002 - DNA, 422 bp, Homo sapiens
cccacgcgtgcgcccacgcgaccgaggacgcgtggtcttccgagcaggggaaatggccatctagctgccctctgctggggtgcagcctatgccatgagaggggactggaagcaggagggagccctggctagggcaggccttatacgcatgggaagctgagcagagatgtgctcactcaaccccattagagatgcttctcctcctcagacatggccagcgtgttggtgactaaaccggcgccaatagtccggttgccatctcgcagggtgaaacgctggcctttctctaagatcattggctgccgcaagatcaagttgaacttcaagtactacccgggcatggcaagctccttctctgggggcaggataatccgacaggccatgtcccaagtcagggagaacatgacaggcatgatgcgtgaa

SEQ ID NO: 36003 - DNA, 416 bp, Homo sapiens
  misc_feature (1)...(416): n = A,T,C or G
cctaaccagagaacatgcatggatatgaagccgcatgcaccaagataatgggttgagaatctaggcgtggtcaagattttctcagtaaaaatttctggatctgggccaacgcctcctcagaactggacccagctggctggctggaaaagggatggtaaagagtgattattaaaggagttctcttgaacattttgtaaaagttggctctgtcacctgagaaccctactctttgagacatttctccaggtggtttatagatgttttaactataaccagattgactcaggagaattaggtcagtatcacactgaacgggatcaatcatatcatgcttcctgtgtctgctcccatccatgagatacaaaaatctcaaattactagcattaaagggaaggagacagtttattttattttan

SEQ ID NO: 36004 - DNA, 461 bp, Homo sapiens
gagacagacacgtaacaggaactcggaaggtagaacttagaattcagaacttgggtttcaattgtagaatttggaatctggaatacagaattgggaagaagaacagagatgacaaaagaccacttgaagagaggttcctaatactagacagatggagagtggcttggctgtttccccctgcatattggggttgaaaacttaaatgtgtagttccagtccttctatgcagagtctctcctgccctccctccttcctgcaggcaaatatacaagctagaccctgttccctcaccctgtatcctgtctcccctaattgacattctatcagcccaaccctcattctgcaaggccacctggtgtgtggaggtggcgggaggagcagtgacttctgggtctcctcagtgacccccatacctcatcatgaacccttggggtagcttgttctgcctaccatccaggaga

SEQ ID NO: 36005 - DNA, 414 bp, Homo sapiens
cacatgttgtggatgatactggtaccaactaccaatgaccaactataaagcacccctgcaataagggagacttcctttttgtagaatagtcctgaaaatactgacagatctggggttagtttgttattttattgcataaaaaacagtttaaacaaattttatagccaaagttttatccttgatgggtttggccagactgcaatttcttgactaaagcttttaatgccaggttaaacaggagaaactttttccactagaagaaaatccttgctatctattttttccaatagaagaaaatccttgctatttattttatttgatgaataaacaaatttattgcagtagcttaaaaaaaatttttttttaaacagtctcactctgtcgcccaggctggagtgaagcggtgtggtctca

SEQ ID NO: 36006 - DNA, 406 bp, Homo sapiens
aagggacgctcaggcggggaccatggcggacggctgctcggagcgggctgacgggcgcatcgtcaagatggaggtggactacagcgccacggtggatcagcgcctacccgagtgtgcgaagctagccaaggaaggaagacttcaagaagtcattgaaacccttctctctctggaaaagcagactcgtactgcttccgatatggtatcgacatcccgtatcttagttgcagtagtgaagatgtgctatgaggctaaagaatgggatttacttaatgaaaatattatgcttttgtccaaaaggcggagtcagttaaaacaagctgttgccaaaatggttcaacagtgctgtacttatgttgaggaaatcacagaccttcctatcaaacttcgattaattgatactcta

SEQ ID NO: 36007 - DNA, 424 bp, Homo sapiens
cggacgcgtgggtttcaaaagagatttcattgctcataacagagcctgggcctattgagaaaaacaatggtgttcacttttttttcaagacaagaaactgaacacaaagtggccttagctttttgcaatacttgaataaagtgtgtactcgcaaaagaatttctgtagcacagcattagagactcataacttttctgcaagaaatacaaacttacatcttccttttactaccttaagaaaactagtgaataaaacattaattcaaagagcaaattatagaaactacaatgacatttaatgcaaattgtaggaatttacatgtttacaaatcatcttcaactggttgtgcagcaattcaataaaatatctttgtattataaaaatgtgaagacgaaatgtacactgatgtaaaggaggtactggc

SEQ ID NO: 36008 - DNA, 467 bp, Homo sapiens
  misc_feature (1)...(467): n = A,T,C or G
gggcggganattacgaagctccgtacagccatcttagaanggccgaccacgcgtnccgagcgtggacctgggacgggtctgggcggctctcggtggttggcacgggttcgcacacccattcaagcggcaggacgcacttgtcttagcagttctcgctgaccgcgctagctgcggcttctacgctccggcactctgagttcatcagcaaacgccctggcgtctgtcctcaccatgcctagcctttgggaccgcttctcgtcgtcgtccacctcctcttcgccctcgtccttgccccgaactcccaccccagatcggccgccgcgctcagcctgggggtcggcgacccgggaggaggggtttgaccgctccacgagcctggagagctcggactgcgagtccctggacagcagcaacagtggcttcgggccggaggaagacacggcttacctggatggggtgtcgatgcn

SEQ ID NO: 36009 - DNA, 441 bp, Homo sapiens
gagaacagtctcttgttctctaaacttgaagtgtttttaatttttggttcaacctagggttagttttgtttgtttttatttttgttttttgcttcattttttgttgacatcatttttctgcctggcctcagtgggcccaagaaagagttcttgttaagtgtttcctgaggaccagacacgtgattccctgtttagacttagcacttcagtgtcggtcttagtttgctatcaaatcttactgtttcaacttgctggactttagaaatcaaaactctttaattagttgcttactttaatgactggctaagtccttatctatgctcataccctgttcacctcaaggaccttagaatcctagcgccttctttgtacaggcaagctattctttgctttgcttgattcagttccttggtgcactgcttaagctcatcttacttttat

SEQ ID NO: 36010 - DNA, 441 bp, Homo sapiens
  misc_feature (1)...(441): n = A,T,C or G
cccacgcgtncgccatcatctccccgttccaccttgtactggtttccaagggtagtcgtttaaaagtaccacaaaaactgggtggcttggaacaacagaaaattattgtttcacagttctggaggccagaagttcaaaatgaagtgttggcagaaacatgctgcctctaaagggactgggaaaggatctgttccaggcttccctatcttctggttgttccttgccttctggctgcgtaactctagtcttcatttggtgttctccctgcatgcatggctttgtgtccaaatttccttttttcatgaggccatcagtcatactggattagggacccactctactactgcaggatgacctcaccttcccaaattacatctgcaacaaccctatttccaaagaaggccacattctgaggtactgggggttataacttcaacatgg

SEQ ID NO: 36011 - DNA, 414 bp, Homo sapiens
cggacgcgtgggctcgcggcgccgcctcctgctcctcccgctgctgctgccgctgccgccctgagtcactgcctgcgcagctccggccgcctggctccccatactagtcgccgatatttggagttcttacaacatggcagacattgacaacaaagaacagtctgaacttgatcaagatttggatgatgttgaagaagtagaagaagaggaaactggtgaagaaacaaaactcaaagcacgtcagctaactgttcagatgatgcaaaatcctcagattcttgcagcccttcaagaaagacttgatggtctggtagaaacaccaacaggatacattgaaagcctgcctagggtagttaaaagacgagtgaatgctctcaaaaacctgcaagttaaatgtgcacagatagaagccaa

SEQ ID NO: 36012 - DNA, 474 bp, Homo sapiens
  misc_feature (1)...(474): n = A,T,C or G
ggagcggnnnnnnnnaaactgacagccgctgattgccctcgaantcnccgncgacccacgcgtccgaagacccaggccatgttcccaaaggccagcgggggccctggattgtgatgcagcctcgggacagggctgaggcctgcgggggaagacctataccccacgcctgggcctggcttcacctcaccctaatcccccgggagggagctgactgatgcaaaaagctgagggggcctgctgggagtggctgtttttatgccccagccccgcaagttggggagtgtttgtgggggtccagagccctcccccagccaggagagaacctcccggaggggttctctgtggggccctgtgtcccctgctcgggagtaaggctggtcctggggtcctccctgcacggaccccactgggcctgccgagtgctgtgttcttcctcagtctggctgtgggcaggagcggcctgcccagtgtcac

SEQ ID NO: 36013 - DNA, 447 bp, Homo sapiens
gcgctcctcttcctcctcctcctacacacttcggcttttgggggatcactgccctctctcggcagcagaatgagccggcaggtggtccgctccatcaagttccgccacgtgtttggacagccggccaaggccgaccagtgctatgaagatgtgcgcgtctcacagaccacctgggacagtggcttctgtgctgacaaccctaagtttgtggccctgatctgtgaggccagcgggggaggggccttcctggtgctgcccctgggcaagactggacgcgtggacaagaatgcgcccacggtctgtggccacacagcccctgtgctagacatcgcctggtgcccgcacaatgacaacgtcattgccagtggctccgaggactgcacagtcatggtgtgggagatcccagatggtggcctgatgctgcccctgcgggagcccgtcgtcacg

SEQ ID NO: 36014 - DNA, 394 bp, Homo sapiens
ggaacttgatgctattttcaggctgaatgacaagactccgcgatgcttctcggcctgggctgcacaacggaatctaccagggaggttttaaaaacactggtacttgctggaggtggtggcgcctgtctgtgattgcagctgctccagaggctgaggcggaggattgcttgagcccaagagtttcggtttatttgctttttcagagtcttgctcttgcccaggctggagtgcagttccatgatctcggctcactgcctcagcctcccaagtagctgggattacaggtgcatacaaccaggcctggctgatcttcgtatttttagtagagatggggtttcaccatgatggtcaggctggtcaagatctcctgacctcaagagatctgcccgcctcg

SEQ ID NO: 36015 - DNA, 426 bp, Homo sapiens
agagaacgtggagtgtgccctgggcctgactgtgggtctggtgggcatcattattgggaccatcttcatcatcaagggagtgcgcaaaagcaatgcagcagaacgcagggggcctctgtaaggcacatggaggtgatggtgtttcttagagagaagatcactgaagaaacttctgctttaatgactttacaaagctggcaatattacaatccttgacctcagcgaaagcagtcatcttcagcgttttccagccctatagccaccccaagtgtggatatgcctcctcgattgctccgtactctaacatctagctggcttccctgtctattgccttttcctgtatctattttcctctatttcctatcattttattatcaccatgcaatgcctctggaataaaacatacaggagtctgtctctgctatg

SEQ ID NO: 36016 - DNA, 412 bp, Homo sapiens
tgatggcctgtgcaagcgggcgagggcatggtgctatgccaagacttcccggcccccaccttgatgggctccttgctattgcctgccccctgtagttacagttacatgatcgacaacgtgatcctgctcatcacaggcacgctgcaccagcgctccatcgctgagctcgtgcccaagtgccacccactaggcagcttcgagcagatggaggccgtgaacattgctcagacacctgctgagctctacaatgccattctggtggacacgcctcttggtgagccgctgtggaggtcatgggaggtgggcagtggtgtcagcatcagcgcatcagggtggggtttgtggacccgctggggggcgaccctgagccataaagtgagacctgcccactgctgcttacctttgtctccct

SEQ ID NO: 36017 - DNA, 421 bp, Homo sapiens
caagatggcgatggagatgaggcttccagtggctcgcaagcctcttagcgagagactgggccgcgacactaagaaacatctagtggtgccgggggatacaatcactacggacacaggattcatgcggggccatggaacgtatatgggagaagagaagctcattgcatctgttgctggctctgtggagagagtaaacaagttgatctgtgtgaaagctttgaaaaccagatacattggtgaagtaggagacatcgtagtgggacgaatcacagaggttcaacagaagaggtggaaggtggagaccaactccaggctggattcggtcttgctgctctcgtacatgaaccttcctggaggagagctgaggagaagatctgcagaagatgagcttgaatgagaggtttcttacaggaaggggacc

SEQ ID NO: 36018 - DNA, 420 bp, Homo sapiens
gcatactgcttccagaggtgtgtatggccccagaggaaaagggagataaagacgaccaactcaacaaagaaacagaagactatttgaacagccttttagaaggatgtttaaaagatactgaagattccctttcctatgaagataaccaagacgacgactccgatctccttcaagatctctctcctgaagaagcatcctatagtctccaggagaatctgccttctgatgagagctgtctttctcttgatgatcttgccaaaaggatagagattgcagaggtaaatcagagatgaagtacaattaaaagtaaaatggcatttaaaaaacatatatatgtattaaatattgccttgtttttgaagttttcccttgtctcaaacatgagggaaaattctagttaacgtaagcttttaattatta

SEQ ID NO: 36019 - DNA, 410 bp, Homo sapiens
caaggtgccatagccacccccaaatatgtttgtttaaagcgtggggttttttaatctctgccacccttgtcaagggagtcttgtaaagttgccgagggtaggttcatctccaggtttcgggattcccatccgtcctggcgatcctgccagcagtgggtgggcagcctgagctccctcgggctcgcctgccagcctggagttcttcctgtgctccttgatcacctgagctgcctcagattccatttggtcctctccttcctggaaggcttccttttatgttttgttttaatcccaaatgtctgaatgttttgcagtgtgtaggggtttgagccccttgatcattctccttcctttttgctcccgcttccctctccatgaagtgattctgttgacaataatgtatactgcgg

SEQ ID NO: 36020 - DNA, 467 bp, Homo sapiens
tgttgatatagatttttctggaccaaccatctatggctggtctgtgttggccttcgaagggtggcttgctgcctgtgagatgagttttgacacagccaaatccaaactgtcacagaataatttcgccctgggttacaaggctgcggacttccagctgcacacacatgtgtgagtgtttataatttattccttagtatcagtgcagctgcccaaaatattgtagccattagcatgctgagaagtgatggtactcagatttagcatgccttggtgaatatccatccttgcggcgctatcctcatagcaaaaccttgccaggaggctggtgcacgtggtgtgcaggctgtgctgctggtggtcactggcccctcagcctgcaccccaaacttgaagaagctccagcctctgtagaacaaccactgggatagagggagcccagagcatggcttacctcatggtaagatgag

SEQ ID NO: 36021 - DNA, 411 bp, Homo sapiens
tggacagaaatcttacaaatgtcatcagtgtggtaaggtcttcagtccgagatcactccttgcagaccatcagacaattccttttggagacagttgtttcaaatgccattagtatagcaagccatcaagcattaattgacattacagttaaatgagcactgacctgagtttgagttgacttaacattgagtttaagcattaattgacattaaactgtttatgttaagaggactgggctgggcactgtggctcacgcctgcaatgccagcactttgagaggccaagactggtaggtcactggaggttaagagtttgagaacagcctggccaacagacgggagccacttttcccagcctgtgttgtcatttctattctttctttcttttttcttttttttgtttttgggtttg

SEQ ID NO: 36022 - DNA, 321 bp, Homo sapiens
cagaggctgactgaggccttcaggacgaccgggctgtgagcacgaggaacatgactggatgcggcatatccggccgtggggtgatgccaggatgggcacgaccgacctgagctcatgaggcagcagagcgagggaggaggagaggccccacgtgaacggaggggcttgtccaggccggcagcatcaccggagcccagggcagggtcagcagtgctggccgtggggccctcctctcagccaggaccaaggacagcagccttccaccaaagggcgccattcggttctttcaccaccttgggcaaccaccttcgcttttacaaa

SEQ ID NO: 36023 - DNA, 410 bp, Homo sapiens
attcgtagctactcttaaccatttaaaggttttcttcctgcatggcagcccttctaaggcttttgttcgtggtggcctactctgcttgagattgactacaaaccatttttttaatgtggactatgtgcaaattatgatgccccatgaacaacaactgcatatgtatttgtgagtggatataatgtaacatttttaattgaggttacagtctctgaaaggacatgccctttttggtgcagaactcatctttcttatgcttgaaatcgccgaatttgattagcactcatgactaatacagatcgcaaactatttcatgtcattgtcgccctggctccttacatgaatgctctgcttacttctgagatgaatgcctggctccttttgtagttatcagagatctacaagtaaca

SEQ ID NO: 36024 - DNA, 399 bp, Homo sapiens
ttttccctaaaatacttattatgtaagggtcattagacaaatgtcttgaagtagacatggaatttatgaatggttctttatcatttctcttccccctttttggcatcctggcttgcctccagttttaggtcctttagtttgcttctgtaagcaacgggaacacctgctgagggggctctttccctcatgtatacttcaagtaagatcaagaatcttttgtgaaattatagaaatttactatgtaaatgcttgatggaattttttcctgctagtgtagcttctgaaaggtgctttctccatttatttaaaactacccatgcaattaaaaggtacaatgcaaaaaaaaaaaaaaggggcgcccgttttagaggatccttggggggccccagctttacccgg

SEQ ID NO: 36025 - DNA, 405 bp, Homo sapiens
cttaaaacaatgaaagagcatttatcgtttgtcccttgaatgtagaatttgtttttgatttcataattctgctggtaaatgtgacagttaaaatggtgcattatgtatatatattataatttagaaataccattttataattttactattccagggtgacataatgcatttaaatttgggatttgggtggagtattatgtttaactggagttgtcaagtatgagtccctcaggaaaaaaaaaaaattctgttttaaaaagcaatctgattcttagctcttgaaactattgctacttaaatttccaataattaaaaatttaaaatttttaaattagaattgccaatacttctacatttgagaagggtttttttagaaatacatttagtaaagcccccaagacatta

SEQ ID NO: 36026 - DNA, 476 bp, Homo sapiens
  misc_feature (1)...(476): n = A,T,C or G
cgggggannnnttttgaggccctacgagcgtctngaananncgcnagaatacgcgtacgaccacgcggacgcattccggacggtgggtacggagtttttcggatgtgtaggcgcggcccgggacgctcgagcttaaggagagctgtcttctggagactgcgccgtcctcccgggagagccagaaagaggacatggctgctgggcagcgggaagcgaggccccaggtgtcactgacgtttgaggatgtggctgtgctgtttacccgagatgagtggagaaagctggccccttctcagagaaacttgtaccgggatgtgatgctggagaactataggaacctggtctcactggggctcccatttaccaaaccaaaagtgatctccctgttgcagcaaggagaagatccctgggaggtggagaaagacggttctggcgtctcctctctaggatcgaagagcagtcatataaccacaaag

SEQ ID NO: 36027 - DNA, 448 bp, Homo sapiens
  misc_feature (1)...(448): n = A,T,C or G
cccacgcgtccgggagcagggttgggacaaccgaggaggctgcggcaccccctgccctgctcacagatgaacaggatgcctagggggacggcgatgggcctcacgggcccgcccagcaccctgagaccacactgttgcctcccagtgaccctgctgggacaccaggacaaggaagacagtttcgcctctcgaaagccgcagctgcgcctaggctggagctggaagggtgggtgaatccggcttgggcatccccaatgaactctgccctgcctgggactctatttattctgattaaaggggttttgcanatggnacaaaaaagaaaaaatacaaaacttaaaaaaaancgggggggctggttttaaaatttcccgtggggggcacaaatttagggggggggcggagagaaaacgctttccttttgaggggggattttaataaggagggg

SEQ ID NO: 36028 - DNA, 393 bp, Homo sapiens
gtatgttctggtcggaggggtcatctgcatggaacttatcaccaaacatggctggagcagtgcctactccatatagtcagagatcatgctaatcactgcctcactggtgaaggggaaagcacgagtgcctgttggagccaacaaatgtcaatacagtctgacaagagcacagcagtcctacaagtacttggtgcaaatccacgaaaaaaacggctgttacacacccccataagaagacagttaaccctgtagtattagccttactccctccccaggcaccactggaccaattacctttgaatgctggatttggatctcacgctgcctctgtggatccctccctcatttttactggacgtgatagctctgcctattgcaggacaatgatggcta

SEQ ID NO: 36029 - DNA, 432 bp, Homo sapiens
ccaggcctaagagtagcaggaactctaagaccacagagttttttataaatgtataaatgtatcaagccaaatgtgcagatgctaactggacattctggggaactgggcaccaggagtgccttcatacactgtaccccagctctcttctaaaagagaagtgggtgggcacactgaactgtttggtggccccaaccacaggaagctgcaattctctggcttagggtgatacttttgccctccttgtgcccctctcagctttccatccccagctaggaagaaagaatggcactcttgggcttggcccagaattagagttattagagcaagagagagcttacgaagcatgagggcaactatagtgaggccttattgccaggagggagggttttggttgctggcgcttgtgtataaaggggcaagagcagctccttt

SEQ ID NO: 36030 - DNA, 407 bp, Homo sapiens
cggacgcgtgggcgtgagcttaggccgctggttttggtgatttttgtctgattgcaatgtctggacgtggtaagcaaggaggcaaagctcgcgccaaagcgaaatcccgctcttctcgcgctggtctccagttcccggtgggccgagtgcaccgcctgctccgtaaaggcaactacgcagagcgggttggggcaggcgcgccggtgtacctggcggcggtgttagagtacctgaccgccgagatcctggagctggccggcaacgcggctcgcgacaacaagaagactcgcatcatcccgcgccacttgcagctggccatccgcaacgacgaggagctcaacaaactgctaggccgggtgaccattgctcagggcggcgtccttcctaacatccaggccgtgcttctg

SEQ ID NO: 36031 - DNA, 411 bp, Homo sapiens
  misc_feature (1)...(411): n = A,T,C or G
cccacgcgtncgcaactgtgttcactagcaacctcaaacagacaccatggtgcacctgactcctgaggagaagtctgccgttactgccctgtggggcaaggtgaacgtggatgaagttggtggtgaggccctgggcaggctgctggtggtctacccttggacccagaggttctttgagtcctttggggatctgtccactcctgatgctgttatgggcaaccctaaggtgaaggctcatggcaagaaagtgctcggtgcctttagtgatggcctggctcacctggacaacctcaagggcacctttgccacactgagtgagctgcactgtgacaagctgcacgtggatcctgagaacttcaggctcctgggcaacgtgctggtctgtgtgctggcccatcactttggcaaagn

SEQ ID NO: 36032 - DNA, 436 bp, Homo sapiens
cccacgcgtccgctcaccaccatgcctggctaattttttttgtatttttagtagagagaggtttcaccatgttggccaggctggttttgaactcctgacctcaggtgatcctcctgcctcagcctcccaaagtgctgggattacagacataagccaccatgcttggccaatatataaagatttttgttgttgatatttaactcttctgtggctttatagttttttttgggagggcagtttgaactatccaatacttgaaaagatgatttttacatcttctatattcatagcggattgttccatatctactaagttttgtaggactttatatattttagcctactattaaatacatgcagggttagaattattataattttattggctcacagggaatcttgtgtcctctgtactttcaccctcatctcccattcct

SEQ ID NO: 36033 - DNA, 477 bp, Homo sapiens
  misc_feature (1)...(477): n = A,T,C or G
tggcggtcccccattgaacccttgttgacggccgtgaagtaccgggncgacccacgcgtncgaaaaaagaaaaaggagtagatgaaaaggaagcatgccctaaagatcatcaagtaaacctgtcttgaatacgtgtagcagtttttcactgttttggatttaaaaatgttttaagttttatttttaatcgacaagtcattgtattgcatttgcggaatacagtgtgatgctttgcaggtacataatgtgaaattattagatcaagctaattaacatctttcatttttttcagtggtaatacatttgaaatttgctgtttcaatatatattattgactgtagtcaccctgttgtgcagtagatctcaaaatttattccttgagtttagctgcagccttctacccattctctttcccaccttccccagcaccccaccctcatcctctgataaccatcattctgttctctacttctagga

SEQ ID NO: 36034 - DNA, 426 bp, Homo sapiens
  misc_feature (1)...(426): n = A,T,C or G
cggatcctttgcagcagtgcttcaaaaaagatgaaattttagatgggcagaaatcaggcgaccatctaaagcggggtaggaagaaagggagaaacagacaggaagttcctgcatttactgaacctgacacgactgcagaggttaaaacaccttttgatttggccaaggcacaagagaacagcaactccgtaaagaagaagacaaagtttgtcaatttatacacaagagagggacaggacaggcttgcagtcctgctccctggtcgtcacccttgtgattgcctgggccagaagcacaagctcatcaataactgtctgatctgtgggcgcattgtctgtgaacaagaaggctcaggcccttgcttattctgtggcactctgggggtgnnnnnnnnannnnnnnnannnnnnnnnnnnnnnnnnnnnn

SEQ ID NO: 36035 - DNA, 409 bp, Homo sapiens
aagtcagtctgttcttactgaatttcttctcttgaactttctgtttattccttattttggacacagtagacaattttgctcaatttcacttctgcctttcttgggttcaggtttggtaccaataattggtaaagctgatgtaattctaagtttttctcatccagcgcataggaaagcttgcctataggtatctgatttaattattttgaatagtcaatgggctaaccaaggagaagatgaggggatcaaatatctgatgtttaaattaaaccagtattcatctctttactttaaatttggtctcttaaaggtctcgcattttgtttcatttgtagtgccacagtttcaggattaatggtattctttcctttcacgctttaaatgaagaaattgttaatagaaagaagaa

SEQ ID NO: 36036 - DNA, 405 bp, Homo sapiens
  misc_feature (1)...(405): n = A,T,C or G
cagtcacctcgagtcattctgtttcccatacaccttgatgcctttgctcctgtctctttctcctcacctggggacaccttcaccttttttacttctgggaattagcacagcacagtagtcctagaatgaactctagaaccaaacgctttctagtggcgtggtcttagatatgttacttaaatctatctgtgcctcagtttcctttgcagaagtgggatataatatcaaggagatggcatgtgcctaacccacaataattcctacaaaagtgtttgctattattgtttttattgctattattaagattcacctcaaatgttactgtgtaaccttctcccaccttttcaggtataattcattacttcctcttctgcagncccacactgccatggttgcttttatcac

SEQ ID NO: 36037 - DNA, 410 bp, Homo sapiens
aagcaatgcgagttgtaaaataccagctctacaagaagctaggctctgtgacggcatagttttcagtagctttatcacaatattcacaatggagaattatatgacatggtagcagaaataggcccttttatgtgttgcttctattttacctcaaattgtagatatagggtaatcaataaaatccatccatgcctttcacacgctaaaaaaaaaaaaaaaaaaaaaaaaaaaaaaaaaaaaaaaaaaaaaaaaaaaaaaaaaaaaaaaaaaaaaattaaaaaaaaagaaaaaagggggggggggggttttataaaaaacgtgggggggggaaaacattcctggcgtttgtaaattttttttttttttttttttggggggggtataaaaaccccggggggttattttgggag

SEQ ID NO: 36038 - DNA, 414 bp, Homo sapiens
  misc_feature (1)...(414): n = A,T,C or G
cccacgcgtccgggggaaaaggtcttgccggagttacttctccatccccactctcaagcctacccagacctggagttgctgtctttgtgaaaagggacatagacacagaatgatatccagatgctagattacgtcaatttacaataaactttaatttaagccagactttcagaacaattagcacctgtataatactaaaaaatgccaagtatctgggaaaggttgggtggggaaggagaaaatagtatcatccatggggatgattcaactcttagggctgccagcctagcacactgctagcaacagctgggaagaaatcataaagtgaattttccacagataaaccagccagaaataacaccagactgccaagtcagatgtgatttcttagtcataaaaggtacttttcattcn

SEQ ID NO: 36039 - DNA, 407 bp, Homo sapiens
ctccatttccacagccaaatgggggaagaggtgaggctaggggagtgctgtgctgattctccagccatgggcagacaggtcacccaggagcctcaaggaaagccctggagggaatcacatgtgtactttttcatgaagctttttgcaaagcacatctgccatacactagtttattgaactaatgtccaggagtagacgtgattggtggccaagttatttggggacacctaaacagatcactgacctgaatgacttctcagaacctttaatatgccaatgcgggtggcaaacttacaagaagggagctaagtatccagcctctcccaaacctctttgaacaaagcttctgtccctcccacacctctcacctcacaggcacatcaagctgcaaaatgcgctttataaac

SEQ ID NO: 36040 - DNA, 383 bp, Homo sapiens
acgatgaggaggccctggaagacagtgccgaggaaaaggtggaagaaagtagggcagagaaaataaaaagatccagcctgaagaaagtggattgcctcaagaaagcattttctcgccagaacatcgagaaaaagatgaacaagctggggacaaagatcgtatctgtagagaggagagagaagattaagaaatctctcacgtcaaatcaccagaaaatatcctcaggaaaaagctcccccttcaaggtttctcccctcactttcgggcggaagaaagtccgagagggagaaagccatgcagaaaatgagaccaagtcagaagacctgcctagcagtgagcagatgccacatgaccaggaagaggagtcctttgcagagggtcat

SEQ ID NO: 36041 - DNA, 408 bp, Homo sapiens
cggacgcgtgggcagaaatttgcatgtataatttgtgtttacttgtaactttctgggtatatactgcttatatctgcggattcaagttactgaagtgaataccaataaaaagaaaaccctaggccatgttaaaaaaaaaaaaaagggggggcggctttaaaagacccctgggggggcccaggtttacccgggcagggaacggtaaagtttttcccttatagggagtggaataaaaacctgcctggggatttttgggaaggaacctttcttctggggggggacatattgggccaacctacctacgaaaatttaacccttcaggggaactaaaaatttttaagaggctaatgggtaaaaccaagcgtcaaatgctggctggtggaaagttacgcgcacattaccaaggcg

SEQ ID NO: 36042 - DNA, 412 bp, Homo sapiens
  misc_feature (1)...(412): n = A,T,C or G
tatttgcgtcttctagaaattcatgtaaatggaaatcatatttaggtctggcatctttttttttttcctattttaatacttttatgttcaggggtccatgtccaaatttgttacataggtaaatgtgtgtcatgggggtttggggtataaattacaccccattagttatttttcccgatcttttcctttttcccactttccaccctccaccttttgaaaggcctcagtgtgtgtggtttccctgtgggcccatgtgttcttattattaaactgccacttttaagggaaaacatgcggaattgggttttctgttcctgcattggttggctaaggataatgggcttaagttccatccatgttcctgcaaaggacatgatctttttcttttttatggctgcagggtctggtattn

SEQ ID NO: 36043 - DNA, 455 bp, Homo sapiens
  misc_feature (1)...(455): n = A,T,C or G
natgatacccctgcggaccatgatgacatccgganncccaggccaaggcaaacacacttcctggtcatctccttgtgctagngggttgaatatttgaatgatgtctttttcactgagaggataagcttccatgtgtcccacctttatggcaggggtggaaggaggtacatttaattcccactgcctgcctttggcaagccctgggttctttgctccccatatagatgtctaagctaaaagccgtgggttaatgagactggcaaattgttccaggacagctacagcatcagctcacatattcacctctctggtttttcattcccctcatttttttctgagacagagtcttgctctgtcacccaggctggagtgcagaggcatgatctcagctcactgaaacctctgcctcctgggttcaagcaattctcctgcctcagcctcccgagtagctggga

SEQ ID NO: 36044 - DNA, 411 bp, Homo sapiens
  misc_feature (1)...(411): n = A,T,C or G
ttttagttgagattgacttctatcatttccttttaaaaaaagttaattcttttttaaatttcaatagcttttgggatacaagtggttattggttacatggatgaattgtatagcatgaactccgagattttagtgcacccatcacctaagtactgtacattgtacccaatatgtagctttttaatctctcttgtccccgaccccaccttctgtgagtctccatagtccgttatattcactctgtgtgcctttgcatacctgtaccatttccttttatggttttcttttagatacatgcagtaggtcaaggaatataggctaaaaaattttaattatttattttaagggtttaaaattttgtgtttcctaaaatacagaaattataatctgaaatactataaaaatcagaan

SEQ ID NO: 36045 - DNA, 415 bp, Homo sapiens
ttgggtcggcttggactgcggcctgacatacacgtgccggttcaggtctgtcccttctaaaaaaacggggaatctaggaggaccttcctgcatactgtgagcagtgaaaaggtccgctccactaatcttaactgcttagtgactgcggacgggaggcatgacggctccaagccctgcgtggacgtgctgttccgagacgggcatcgactgattatgcgcggcgctaatctcaccgctctggaaatgctcaccgccttggcctcccacatccgggccagggaccccgcggacagaggagacaagccggtcgctgatactggtcgctgacagcgccgaagacaccaacaagatgatgctatcgtggactaggacacttaacctaagaagaggttcacttactcattcatatcactag

SEQ ID NO: 36046 - DNA, 396 bp, Homo sapiens
  misc_feature (1)...(396): n = A,T,C or G
ctactgggaagcagaccagttagagaattgcttaatatgaagctagttggttttagaaatcacatagcccaacccctcatgaaagaaccacggcttggataaaattacatagaaaatgaatgacacagactattgggctgagaatgagaacgcgtatcccctcacttttatcgggaacacagctacctgcctcccgagagagtctccctagccaagtttccttgttaatgtgatgagactttactagaatgtctctgtcctgtttatgcttccctgtgctcttccttacatccccttagctcttgatgttataattttaaaatattttcatttcccctaaaggctacaacaacaaaagaaatgtttatagaatttggatgaattatgatttaactn

SEQ ID NO: 36047 - DNA, 401 bp, Homo sapiens
cccacgcgtgcggagcagctgccgaagtcagttccttgtggagccggagctgggcgcggattcgccgaggcaccgaggcactcagaggaggcgccatgtcagaaccggctggggatgtccgtcagaacccatgcggcagcacggcctgccgccgcctctttggcccagtggacaacgagcagctgagccgcgactgtgacgcgctaatggcgggctgcatccaggaggcccgtgagcgatggaacttcgactttgtcaccgagacaccactggagggtgacttcgcctgggagcgtgtgcggggccttggcctgcccaagctctaccttcccacggggccccggcgaggccgggatgagttgggaggaggcatgcggactgggacctcacctgctctgctg

SEQ ID NO: 36048 - DNA, 423 bp, Homo sapiens
cggacgcgtgggcgccggtcgggtccggccgccgttttgttcagctcctgagaccttgctgtccgccgggctgccgtctgcgcgcctcacgctcctcagccctggaccggggacaagtaaccctcggtgacaagaccaaagtgcactgctgcccacacagttcctacctttctggcttcaattcttcagaagagtttgccgtcctttggggagaacgtgatttttgttatctcagcccactgacttcattgatctctaatcttttttaattccttgggccaactttgttcgtgcccccacactgtagccagaagcccgttggcgagctctggcacctgcaaaccaccccgtggaacgagtgtttcctctggctgaaggttggagaggaggtgtggtcttagcaagcgggccgtaccctacaac

SEQ ID NO: 36049 - DNA, 406 bp, Homo sapiens
caagaaggggcgccccagcaccgccggctccaagattatgaaacttgccaactgacctggtggccacactgatgaggtgcacaccccactacatccgctgcattaaacccaacgagaccaagaggccccgagactgggaggagaacagagtcaagcaccaggtggaatacctgggcctgaaggagaacatcagggtgcgcagagccggcttcgcctaccgccgccagttcgccaaattcctgcagaggtatgccattctgacccccgagacgtggccgcggtggcgtggggacgaacgccatggcgtccagcacctgcttcgggcggtcaacatggagcccgaccagtaccagatggggagcaccaaggtctttgtcaagaacccagagtcgcttttcctcctggg

SEQ ID NO: 36050 - DNA, 420 bp, Homo sapiens
cccacgcgtgcgattactctaaatgttttgtttttgtaattctggctaagaccttttaaacatggttagttgctagtacaaggaatcctttattggtaacatcttggtggctggctagctagtttctacagaacataatttgcctctatagaaggctattcttagatcatgtctcaatggaaacactcttctttcttagccttacttgaatcttgcctataataaagtagagcaacacacattgaaagcttctgatcaacggtcctgaaattttcatcttgaatgtctttgtattaaactgaattttcttttaagctaacaaagatcataattttccatgattagccgtgtaactcctgcaatgaatgtttatgtgattgaagcaaatgtgaatcgtattattttaaaaagcggcagagt

SEQ ID NO: 36051 - DNA, 453 bp, Homo sapiens
  misc_feature (1)...(453): n = A,T,C or G
aatgatcccctcggacnatgatgacactgcggacaccccgcgttcgcgatctaacaccgcgttggggcttacttagatttgaatatattacgaacattttctttttaaataaatgtaatttcctatctttgtgatcaatggggggagggtagctgcgcctaatttaggattgatttattctaacctctcttactaaataaatgcttgtgttcagagtctgtttggaatttaacccaatgcttagaactccttaaatatgcagaaatatattttaggggcaattgattcatggaactctcctgctttggagcacaattgtattataattgcccggaaactggccagataatgtagaacgcacaagttgttgagaagcccttttgtttcctgatagttacatgtaattccagcagtatttggaaataatttgctaagaggtgagaatgtaacatt

SEQ ID NO: 36052 - DNA, 396 bp, Homo sapiens
  misc_feature (1)...(396): n = A,T,C or G
cccacgcgtccggtcttcagctctaaagaggccatttgaagatggattaggggatgataaagaccccaacaagaagatgaaacgaaacttaaggaaaattctggatagtaaagcaatagaccttatgaatgcactaatgaggctaaatcagatcaggcctgggcttcagtataagctcctatctcagtctggccccgttcatgccccagtcttcacaatgtctgtagatgtggatggcacaacatatgaagcctcaggaccatccaagaaaacagcaaaacttcacgtagcggtgaaggtattgcaggcaatgggatatccaacaggctttgatgcagatattgaatgtatgagttccgatgaaaaatcagataatgaaagtaaaaatgaaacagn

SEQ ID NO: 36053 - DNA, 430 bp, Homo sapiens
cccacgcgtccgccggggccgactccacgaacaccagcccaaactgaagtgcctcttccctcccctgctggcgctgctccgccctgtgccccccgcccatcgccccccacccatctctggagagccctctgcacccaaagaggactagagatgccgagcggccatgagagagagcggaaggagcagctgatgcccagagcggggccagagcggcgggtctatgttcacgtccccccagcagcaggcggaaccacccagccagggcactcagtgcattggactgtccacatgttcttgaggaaagccggtggaagattctggaatgccgtgcggatgaacttcagcacccgagtcagtcccagctcatcctccccagtttaccactttgttctaataggagatgggaacacgagaagtttgatggctttgc

SEQ ID NO: 36054 - DNA, 435 bp, Homo sapiens
cactgtgttccccaagtgagccagcagatctgaccactgttctccagcaggcctctgctgcagctttttctctcagtgttctggccctctcctctcttgaaagttctctgcttactttggttttccctctgcttgtaaaacattgagtcccctccctgccttggttaattgactcacaccagctgtgcgatgcccgcttttacaattaaaggaaaactgttgtgttcagtgtcaccttgtcagcaacactgtgtcccttcgccccgccgttcttctctgctgcatttggacatcagccaaatttgaacccaatcaaatataacgtgtctgacactgattttgtttttactcaataaatgtatagactacaaaaaaaaaaaaaaaaaggggcggccgttttaaaggttccctcggggggcctcattttacgcgtgc

SEQ ID NO: 36055 - DNA, 401 bp, Homo sapiens
cttaaccaatcatctaaaggagatcatatcttacaggcagctacatgttatggatgaaacacatgtgattaatcaagtgaaagaagatgtatgctatgtgtctcaggatttttatagagacatggatattgcaaagttgaaaggagaagaaaatacagtaatgatagactatgtcttgcctgacttcagtacaattaaaaagggcttttgtaagccaagggaagagatggtgttgagtggaaaatacaaatctggggaacaaattcttcgtttggccaatgagagatttgctgctccggaaatactctttaatccttctgatataggcattcaagaaatgggaattccagacgctattgtctattcaattcaaaatctacctgaagaaatgcagccgcatt

SEQ ID NO: 36056 - DNA, 395 bp, Homo sapiens
  misc_feature (1)...(395): n = A,T,C or G
cccacgcgtncgcacagaccactccaccagcagccttggaggcacagaccactcaaaccacagccatggaggcacagaccactgcaccagaagccacggaggcacagaccactcaacccacagccacggaggcacagaccactccactggcagccatggaggccctgtccacagaacccagtgccacagaggccctgtccatggaacctactaccaaaagaggtctgttcatacccttttctgtgtcctctgttactcacaagggcattcccatggcagccagcaatttgtccgtcaactacccagtgggggccccagaccacatctctgtgaagcagngcctgctggccatcctaatcttggcgctggtggccactatcttcttcgtgtgcact

SEQ ID NO: 36057 - DNA, 477 bp, Homo sapiens
  misc_feature (1)...(477): n = A,T,C or G
tcatagttctccctgagtgagacttgcctgctcctctggcccctggtcctgtcctcttctccagcatggtgtgtctgaagctccctggaggctccagcttggcagcgttgacagtgacactgatggtgctgagctcccgactggctttcgctggggacacccgaccacgtttcttggagctgcttaagtctgagtgtcatttcttcaatgggacggagcgggtgcggttcctggagagacacttccataaccaggaggagtacgcgcgcttcgacagcgacgtgggggagtaccgggcggtgagggagctggggcggnctgatgccgagtactggaacagccagaaggacctcctggagcaaaagcggngccaggtggacaattactgcaaacacaactacggngttggtgagagcttcacagtgcagccgcgagtccatcctcacgtgactggtgatcctgcaaagacccagccct

SEQ ID NO: 36058 - DNA, 408 bp, Homo sapiens
  misc_feature (1)...(408): n = A,T,C or G
cggctcccactccatgaggtatttcgacaccgctatgtcccggcccggccgcggggagccccgcttcatctcagtgggctacgtggacgacacgcagttcgtgaggttcgacagcgacgccgcgagtccgagagaggagccgcgggcgccgtggatagagcaggaggggccggagtattgggaccggaacacacagatcttcaagaccaacacacagactgaccgagagagcctgcggaacctgcgcggctactacaaccagagcgaggccgggtctcacaccctccagagcatgtacggctgcgacgtggggccggacgggcgcctcctccgcgggcataaccagtacgcctacgacggcaaggattacatcgccctgaacgaggacctgcgctcctggaccgcggn

SEQ ID NO: 36059 - DNA, 485 bp, Homo sapiens
  misc_feature (1)...(485): n = A,T,C or G
gtttccctcggcgtgctactgtgcgctcgatccagcaccatggggaagcgggacaatcgggtggcctatatgaacccaatagcaatggcgagatcaaggggtccaatccagtcttcagggccaacaatacaggattatctgaatcgaccaaggcctacctgggaagaagtaaaagagcaactagaaaagaaaaagaaaggctccaaggctttggctgaatttgaagaaaaaatgaatgagaactggaagaaagaactggaaaaacacagggagaaattgttaagtggaagtgagagctcatccnaaaaaagacagagaaagaaaaaagaaaagaagaaatctggtaggttcttctgattctgaagatgaggataagaaacaaggaagacggagaaagaanaagaagaaccgctcacataaatcttctgaaagctccatgtcagaaaactgatcagacagtaagtttaaaaagaaaaagagtcaaa

SEQ ID NO: 36060 - DNA, 424 bp, Homo sapiens
tcttgctaaagttaaaataaggaacatttcaccttttaaatatttaattcttatgtggacttatttccagaaaactttggtgataattcttgagacaaaaggtggttaagtagcattattatgtaatgcttatataccatagagtttttaatagaagagaaatccatttcctccgagggtcactattaacaatgtacttccttaaatttagtttaatgattgtaatgggtgctgcatttgcacattgcattaagttatgatgagacgaattgttgttaaaaattatagcaaaaagaaatgtaaacttggttaaaatcctttcactctttgtattgttttttttaaggcttttattccttaaatgtaaaatgactacctaattttttgatgtaaatacattaaattcaaaaaaaaaaaatggggg

SEQ ID NO: 36061 - DNA, 426 bp, Homo sapiens
ggctggtggacatcctggcttccacggtggtggccatgtcggccgtggcccaactgtgggaggacgagtgggaggtgctgctgatctccctgcagggcacagcgccattcctgcatgtgggggctgtggcagcagtcaccatgctctcctggatcgtggcaggacagttcgcccgtgcagagcggacctcctcccaggtgaccattctctgtaccttcttcaccgtggtgtttgccctctacctggcccctctcaccatctcctctccctgcatcatggagaagaaagacctcggccccaagcctgctctcattggccaccgcggggcccccatgctggctccagagcacacgctcatgtccttccggaaggccctcgagcagaagctgtacgggctccaggctgacattaccatcagcctggacg

SEQ ID NO: 36062 - DNA, 411 bp, Homo sapiens
  misc_feature (1)...(411): n = A,T,C or G
gaataggcaaaggcagtagggatggtgtgagtacacgtggttctttaaatcaggggtcagcaagctttttccgttaagggccagagagtaaatattttcaactttgcagcccctgtggtctctgtcaagacttctgttgttgagtccagtaatcaagttaaatataaagtttcaccagctgaatatgtacaaaaccatgcatctcacgtgcccttacatttctgctaatcataaggattagcataaatgtttatatacctttgaattctaacaatcggattgaatttacttaattttattttggattttttctggaactgcatctcaccgtgtcacctangctggagtgcagtggctgctcacaggtacacttgtagctcactgtagccttgaactcctgggctcaagcac

SEQ ID NO: 36063 - DNA, 432 bp, Homo sapiens
gaaattattattttatggcgtatcttagttattttctgggaatcttgttttgcctgaggacattcttgaagttgagtttataaaggactggccacaaagtctgtcatggagtttttcatcttcagtgggctgtagcagagattattcttttatgaagagtttaaggagtgagaagactcatcttccctatcgcagttctttgtttgtaaatacggagtcattgctcttcctcatgcagctgtcactgggcacagctgtgggtgtgcatgtgtcacggagctcagcacgcacagagcaggagatgacggtgactcctggctccacagggtcgatcctgggctggcttcagtttgctgctttgtccatctagttccttgcacgtattcctaaaaatacagacattttttcccattttaaaaataatgtacttag

SEQ ID NO: 36064 - DNA, 343 bp, Homo sapiens
gaaagccggggcggtggggggggcttagtgccacatgcaccccactcattccaaagccaccaaactgccaggggctgccgtccacccgtggggcccaggggctggggccacagccttgccattttcgttgccataccctcttgccttactcgcggtggaggccggatttgcacgggcagacgtgcacctgggcccgtggggagcttgttctgaccagacgtacagattttcattctcagaaagccttacttttcaaccaaatttttgtagccagttttgtgaatttgtacactgaaagaaaatttaaataaaggggaagtccacattaaaaaaaaaaaaaagg

SEQ ID NO: 36065 - DNA, 429 bp, Homo sapiens
  misc_feature (1)...(429): n = A,T,C or G
aggagacagttccagttcctgtaccttcatagaaaacctaacagcctaaagaatgttttttgatactgcctttggaaagaaaagagaataccaccaagaccaggaaaagattaaagaagaaaattactgatgttcttgcaaaatcagaaccaaaaccagggttacctgaagacctacagaagctgatgaaggactattatagcagcagacgcttggtgattgaattagaagaactgaacctgccagactcctgtttgctcaaggccaatgatttgactcacagtctttcctcatacctaaaagaaatttgtcctaagtgggtaaaacttaggaagaaccacagcgagaagaaatcgngcctgatgctgatcatctgcagctcggccatccgagccctggagctcattatgtcgatgacagcattcagag

SEQ ID NO: 36066 - DNA, 427 bp, Homo sapiens
  misc_feature (1)...(427): n = A,T,C or G
ctcaacgctgcgccgtctgcgggcgcttccgggccaccagtttctctgctttccaccctggcgccccccagccctggctccccagctgcgctgccccgggcgtccacgccctgcgggcttagcgggttcagtgggctcaatctgcgcagcgccacctccatgttgaccaagcctctacaggggcctcccgcgccccccgggacccccacgccgccgccaggaggcaaggatcgggaagcgttcgaggccgagtatcgactcggccccctcctgggtaaggggggctttggcaccgtcttcgcaggacaccgcctcacagatcgactccaggtggccatcaaagtgattccccggaatcgtgtgctgggctggtcccccttgtcagactcagtcacatgcccactcgaagtcgcactgctatggnaag

SEQ ID NO: 36067 - DNA, 457 bp, Homo sapiens
  misc_feature (1)...(457): n = A,T,C or G
cccacgcgtgcgcccagcttcctccccgcaacccggagaatttcaacgcattgttcggtgcgggggacgaggacgacaccgatttcctctcgccgagcggcggtgccagattggcctcactttttggactggatcaggcagctgctggccatggaaatgaatttttccagtacacagccccaaaacagcctaagaaaggccagggaacggcagcaacaggaaatcaggcaacaccaaaaacagcaccagccaccatgagcactcccacaatactggtcgcaacagcagtccatgcatatcgatacacaaatggtcaatatgtaaagcagggcaaatttggtgctgcagttctggggaaccacacaaccagagagtataggattcttctttatatcagtcaacaacagccagttacggttgctaggattcatgtgaactntgagctgatggttcggcc

SEQ ID NO: 36068 - DNA, 408 bp, Homo sapiens
aaaacaagacaggcagaaaccaaaatgaaaacattaacacaaaccctataactcctgaagtagattataaaggtaattctacaaacatgcctgaaacatctcacatcgtagctttaacttctaaatctgaacaggagctttatataccttctgtcgtcagcaacagtccttcaatagtacagagcattgaaaacacaagcaaaagtcatggtgaaattttcaaaaaggatgtctgtgcggaaaacaacaacaacatggctatgctaatttgcttaattataattgcagtgctttttcttatctgtacctttctatttctatcaactgtggttttggcaaacaaagtctcttctctcagacgatcaaaacaagtaggcaagcgtcagcctagaagcaatggcgattttt

SEQ ID NO: 36069 - DNA, 430 bp, Homo sapiens
cccacgcgtccgcccacgcgtccgcccacgcgtccggagatccttcaaataactcgagaatcatttttgaacctaaggaaagatgatgcgtcggaaagtacttctttgtcagcattagtgaccaacagtgatttgagtctgaggaagagctgaagagtttctgagtctgtgagcttcttacatggctccaaatggtcaaataagtgaatgaatgaatggacagaaaattcaatcctttatttttttctctgtaaatatgtacagggcacgggctatgagatagcaacaaaaaatgcatagttaatggtcatagactttattccaaaacataattggaaaatagaaactgagccattgccaaatggtaaagaaatgaaaagttttcacagtgactactgaatataccaagagcttttggcagtactgctgg

SEQ ID NO: 36070 - DNA, 431 bp, Homo sapiens
  misc_feature (1)...(431): n = A,T,C or G
aagctggaatatggaggccagacatggcatgagcactgcttcctgtgcagtggctgtgaacagccactgggctcccgttcttttgtgcccgacaagggtgctcactactgcgtgccctgctatgagaacaagtttgctcctcgctgcgcccgctgcagcaagacgctgacacagggtggagtgacataccgtgatcagccgtggcatcgagaatgtctggtctgtaccggatgccagacgcccctggcagggcagcagttcacctcccgggatgaagatccctactgtgtggcctgttttggagaactctttgcacctaagtgcagcagctgcaagcgccccatcgtangactcggtggaggcaagtatgtgtcctttgaagaccgacactggcaccacaactgcttctcctgcgcccgctgctctacctt

SEQ ID NO: 36071 - DNA, 484 bp, Homo sapiens
  misc_feature (1)...(484): n = A,T,C or G
ctcagagtgcagatccgtcacagactaaggagatggcaggcattgacagcttcactccatgaaggccatctctgtttctctcctccgcttaaccaagctgttgtggtttttcagcatagtgttgtatgttccattgctagctgtcctgctgtttaacacagtgttgtattttttttctaaatgtacataattagaaaagaaaataacaataggaagctatgtgtatcttctgtgtaaagcagtggcttcactggaaaaatggtgtggctagcatttccctttgagtcatgatgacagatggtgtgaaaaccatctaagtttgcttttgaccatcacctcccagtagcaatttgctttcataatccatttagcaatccaggcctctgttgaaaagataatatgagggagaagggaacacantttcttctgaacttacttccctaagtcactttccttatgtatcatctaatacaatgatcggtgn

SEQ ID NO: 36072 - DNA, 414 bp, Homo sapiens
acaaaaaataaagctctgaaccaagttgtcctatgggacaagattgttttgagaggtgataatccgaagctgctgctgaaagatatgaaaacaaaatattttttctttgacgatggaaatggtctcaagggaaacaggaatgtcactttgaccctgtcttggaacgtcgtaccaaatgctggaattctacctcttgtgacaggatcaggacacgtatctgtcccatttccagatacatatgaaataacgaagagttattaaattattctgaatttgaaacaacatatttttatacttaatgaattgtatctcgttaatctcttcccttacatcttcatgtattgttggtttgttttttgggtctgggtttttttttttgggtaaaagaactaccatcaaacggcctgtttaaag

SEQ ID NO: 36073 - DNA, 430 bp, Homo sapiens
  misc_feature (1)...(430): n = A,T,C or G
cgaggatactgagggccactgtacattgcaaaaaaatgggacaaaagacttagtggaaagggtataaaagctgatgaagcagagcctgaggattttgtggtggaaaaagtactacaccaaggtgtggtgaatgggaaggtggaatattccctgaagcggaaaggatttacacttgctgacaataattgagaacctgaagaaaacttagattttcctgagttcattgaactatttcttaatcctcaaaaaaaactggtaaaggaaaagatagtacaaaaagaaaatctttatccgagagtgaatctgatgacagcaaatgaaagggatgctgctgaaaaaccaggagactttgccagaactcttgatcctaagcaaagaattggtgccacagactgcagtgaagacttaatgtttctaatggaatgcanaa

SEQ ID NO: 36074 - DNA, 428 bp, Homo sapiens
  misc_feature (1)...(428): n = A,T,C or G
cccacgcgtgcggctgcgtgccatcactcaaccataacacttgatgccgtttctttcaatatttatttccagagtccggaggcagcagacacgccctcttagtagggacttaatgggccggtcggggagggggaggcgggatgggacacccaacactttttccatttcttcagagggaaactcagatgtccaaactaattttaacaaacgcattaagaggtttatttgggtacatggcccgcagtggcttttgccccagaaaggggaaaggaacacgcgggtagatgatttctagcaggcaggaagtcctgtgcggtgtcaccatgagcatctccagctgtactagtgccattggaataataaatttgataaggtggtgaannannncnnnnngnnnnnnnnncccannnnnnnaaagaaaacacacc

SEQ ID NO: 36075 - DNA, 413 bp, Homo sapiens
  misc_feature (1)...(413): n = A,T,C or G
gaggggagaagtttgcgactctgacagagctggtggagtactacactcagcagcagggtgtcctgcaggaccgcgacggcaccatcatccacctcaagtacccgctgaactgctccgatcccactagtgagaggtggtatcatggccacatgtctggcgggcaggcagagacgctgctgcaggccaagggcgagccctggacgtttcttgtgcgtgagagcctcagccagcctggagacttcgtgctttctgtgctcagtgaccagcccaaggctggcccaggctccccgctcagggtcacccacatcaaggtcatgtgcgagggtggacgctacacagtgggtggtttggagaccttcgacagcctcacggacctggtggagcatttcaagaagacggngattgaggaggcc

SEQ ID NO: 36076 - DNA, 424 bp, Homo sapiens
aagggtcctcgttttgataatacttcagaatagggaactcatgtgaatactactatgtagaaataaaacctagaccttgagcgaacatctgtatattggttgaaaacgatagtggtaaccattgatcccccttcatttgatgtttggaaaattccagtaattatcatttttgccacgaatatggataccacatagtactttggtgttacctgcttttgaaaaataaagtctttggttcacccggaaaggaaaaagaaaaaagaaaacataaaaaaaacctaaaggggggggtgtttaaaaaaacccctggggggcccaattttcccgggggggggaagagaatttttcttttcttttgggggggcgtaaaaaaaccctgccggggacttttgagaagaaaccttttttctgggggagaaaaaat

SEQ ID NO: 36077 - DNA, 431 bp, Homo sapiens
aggacgcgtgggcgtggagtatgctacataccaggtgacacccctcgagtgactacccttcaacttcagctggagcgcctgcttggctttgggctcgctctgcagccttcgccccgctcctagcctcagggccggactccagcgcagagcccagcccagcgcagcctgccagcagccacccagccgcccagccgcccagccccgcacgaaacccggccagagcttcctagcaggccgagccatgaacaccgaaatgtatcagacccccatggaggtggcgggctaccagctgcacaatttctccatctccttcttctcttctctgcttggaggggatgtgggttccgttaagctggacaacagtgcctccggagccagcgtggtggccatagacaacaagatcgaacaggccatggatctggggaagaatt

SEQ ID NO: 36078 - DNA, 413 bp, Homo sapiens
  misc_feature (1)...(413): n = A,T,C or G
ccgcctgcttagttgtttcaaagttttctgaaagaaaactaggggagcacttgtgaacacaggagcagctggagatctgctttcttaccctaactcttgacaaatgagtcgtctactattttaaagagtctggaggtctctgactctgccataacaataacctgctgttaatttataacacagatttttgtttggaagagccttatttgaaatacactttgatttattttcttaaatatttatattcttttcttgcttacttcagggttggtagcttagttggaagtgccagcacctggcacctattcatatagaacaggctgtactcaagacaacttctagcatttactttaagacttatataatttatttctattttgtgcgtactatagncttgcgcatatgtagttgaa

SEQ ID NO: 36079 - DNA, 431 bp, Homo sapiens
  misc_feature (1)...(431): n = A,T,C or G
accgagcactgtaagctcagctcggctgtagctccgggtttctgccgatggcctccatctgcgccgaaagctgaactgagccccgcggtgccccggagccacagcagcaggtgcagcgacaatcgccgtcgtgcgcagtcgctggagtcctggagagccacgctgtcctctgcagacaacagcatcagtccgctgtgccccaatgcatcgacgccctgtggacggggcctgcagtccacccgtggtctgagcttgccgggctgcagctcggctgggacccagggaggggccaccctgggacccacagtctcctcagtcacgtgcagagcaaaaaatgcttcctgtgtttggaagagcaagtgacgcagcatttattgataaaaatggatttttctgtctgatttcatgctgtggtcgtttaagtaggcaan

SEQ ID NO: 36080 - DNA, 482 bp, Homo sapiens
  misc_feature (1)...(482): n = A,T,C or G
caattgaacngctntgcggtagaggcccggtannaccggcccgacccacgcgtgcgcaaacctcagtggtctctacctcatgggaccccattttagctatgcctttggtatcaactggagtgcggcgaaggggtacgaatatagctacaaggtgtcagagatgaaggtgcggcccgcctagacgggccaggacccctccacatgcacctgctagtggggaggccacacccacaagcgctgcgtcgtggaagtcaccccatttccccagccagacacactcccatgacgcccacagctgcccctttgcccccagctcagtcaagccgccacatgcccacaacctcaccagagggagaattatgtttctaaatatgtttactttgggacagaaaagttttaccagcttcaatgtgtgtttcttgaacaccagaggatttgatcactttcctgtgtctgttgcacgggaaggtttttccttgaat

SEQ ID NO: 36081 - DNA, 424 bp, Homo sapiens
cggacgcgtgggtggaagacagttaaacaaccagtatatgtcgtagatgtatccaaaggaattgttaatgcagttaaggatcctgatgccaatgggaaatcctttgctttcgttggtcccagtcggtacctccttttccacctggtgaagtacatctttgctgtggctcacagattgttcctcccattccccttgccgctttttgcctatcgatgggtagcaagagtctttgaaataagcccatttgagccctggataacaagggataaagtggagcggatgcacatcacagacatgaaattgcctcacctgcctggcttataagaccttggtattcaggcaacaccactggaactcaaggccattgaggtgctgcggcgtcatcgcacttaccgctggctgtctgctgaaattgaggatgtga

SEQ ID NO: 36082 - DNA, 404 bp, Homo sapiens
  misc_feature (1)...(404): n = A,T,C or G
cagtatatttcaatcaattgcatttgggttatatttttggatgctcagagttttcgtcattggccatattggatcctgtattctttaacatgatcctttgtctttggtaaattcttgctttctcacgtagcaacatgtcctaggcttattatgtacttttacttctccagacgtagaaaatagctgttcttcaaattatagagaatcatattttgaaaccacatatctgggatactgagttggcacagcctctaggctttttttgtagacataggaagtatctgtgtatgaggaaaaataaccatcttggcagtacccagagctagccaaactgtgaagcgatggcatagtcctccagaaggctccaggagtctgcccgatatctaactccacctgcaaggagn

SEQ ID NO: 36083 - DNA, 423 bp, Homo sapiens
ccccaaaccacacttaacactcctttgctttctccatgcaaatgcagaatttcttttccccactaagttacaaatatctttaaggcagaaaaacccatgttattaatttttttaaatctccacttctaatgtcagatgactagtaaatcaatttgttagaatacattgttttctgtccatatcttctgcgagtcactcgcccagcagccaggcttctcaagaacggaaggactgctgacgttcacaggtggctaccgggtgggacgctgtgcctgggttatctgatttcttccttcctgccacctcgggaggtagggagagccttctggcaggccaggggcagggacgggttctgagccaaggccttcctgctttcagggcccaccctcttcgtgccatgctgacttacacagttacgtttta

SEQ ID NO: 36084 - DNA, 431 bp, Homo sapiens
  misc_feature (1)...(431): n = A,T,C or G
tcagcaacaatgtcaggatctgtggagtttgcgagtataagatctttaagtgttgaaggtttcatctccataattgcagctgctttagctacaaatattataggaagctgttccttctttttctttacatcaccaaaccttccagtggttacaggcattttgttatccttcaagtgacctggagcctttgttgcatgacaggattgtacctgaagatcacattctttaacaattggacctactgaatctgtaaaactactagaagaaaacatattgaaaatacttcaggacattggtttaggcaaagattttatggctaatacctcaaagcacagacaacaaagataaaaatagacaaatgagactatcttacactaaaaagtagctgtgcaaagtaaagggaacaacaagagtgcagagaatacctgtgn

SEQ ID NO: 36085 - DNA, 494 bp, Homo sapiens
  misc_feature (1)...(494): n = A,T,C or G
aggtgcaatgatnactgacgacntgcgcacggaaccccgggncgacccacgcgtccgatcaatattgttttaattatttacatgctgtgaggcaaggctgtgggaccaaagcttttccagacttccttgactaatcacctgtgcaataccaaattatacattaccaaggagaccacagcacatcaaattataaagggattgccctaaaccagatccccatctcctttggttgagaacagtgcctcatttgctagatggagatgaagtaactttagcgaagtcagctatgcttccattccgtttgatgtagcatcaaagcatatttagtgctgtagtctgagattctgatggattttcatcctgttgcgtcagcttcaggatcatctgaaaatatccagaggcacaaatgacaaagcccagacctggccccgggcagctctaccattagcagctataatcctggattataataaagcacttaaaaccagtaaaat

SEQ ID NO: 36086 - DNA, 459 bp, Homo sapiens
acggagggggctccgcggcacttctggcgctgcgcctgcttctgcaccgataacttgtacgtggcgcgctatgggctgcacgtgcgcttccgaggcgagcagcagctgcgccgggactacggcccgatcctgcgcagccgaggctgtgttagcgccaaggacttccagcagctgttagcagagcttgagcaggaggaggagcggcggcagcggctggggcaggagtcagcagctaggaaagccctcatcgcgagttcctaccacccggcacggcctgaggtctacgactcactgcaggatgcagctctggcccccgagttcctggccgagactgagtacagcgtgtccccagacgcagacctcaagggccttctccagcggctggagacagtatcggaggagaagcgcatctaccgggtgcctgttttcacagcgcccttctgccaggccctgctggaa

SEQ ID NO: 36087 - DNA, 407 bp, Homo sapiens
  misc_feature (1)...(407): n = A,T,C or G
acacacacctcatgtgagaaccatgccttttttagtgtgtcctatttcatacctgtacacacttcctcgttttgtaatgagatttacttacacccaaacagatcctgaaagaaagcttcaagttttctcagatgatggatatgttttcactgtattcaataactgacggatgtaaggtgcacgtttcctgatgtgacgcactgtattccagctggtgatcaagtctgggaacagccgtaacaggtcaaccttgtggagccatcgcgagttagagggtgaaagatggcagaaaaaaaagtcttgtgtgtgagtgtgttttttgagtttgcatcaatcttaatgtctcttcataatacttttataatacattaagcctcttgtctacatatttggagagaatatgactn

SEQ ID NO: 36088 - DNA, 412 bp, Homo sapiens
attctcacgggatcccgaggctgaagaaatagaagctgaatatgctgcattagacaaacgagagccatatgaaggattaaggcctcaggatcttcgtagactaaaagatatgcttattgtggaaactgcagacatgcttcaggctcctctctttactgctgaagctttacttcgagctcatgactgggacagggagaaattacttgaagcttggatgtccaacccggagaactgctgccaacgatcaggtgttcaaatgccaactccaccaccaagtgggtataatgcctgggacacgctcccatctccaagaactccaaggactacacgctcttctgtcacctccccagatgaaatcagcttatctcctggggatttagacaccagtttgtgtgacatttgtatgtgcagt

SEQ ID NO: 36089 - DNA, 459 bp, Homo sapiens
  misc_feature (1)...(459): n = A,T,C or G
cggacgcgtgggtcgcccacgcgtccgggccaagaaaaaggattgatcctggtgtcataaaatatgagtgaaaatttcagagtcctttgttagcttaatcttttcagttttgtagagtttgaatagaccaactgatacttaaataactcagtattagaaatgacaggttgatctcaagtaatttttttttgagacagagtctcttgtcactcaggctggtgtgcagtgtcacgatctcggctcactgcaacctccgccttcagggttcaagtgattctcctgcttcagcctcctgagtagctgggattacaggcgcgccccaccaggcctggctaatttttgtatttttagtagagatgagggttcaccatgttggtcaagctggtctcgagctcctgacctcgtgatcccctcacctcggccttccaaagtgctgggattacaggcgtgagctaccgn

SEQ ID NO: 36090 - DNA, 396 bp, Homo sapiens
gtgctcaaaaagattgcccagaaagccctggacctgcccagctctggcgagggcctggccttcttcaccttccccaacattgccagtgccaccaagttcaagcagctctaccgctcccgcatgaactccctggagatgactcccgcagtcaggcagagggtgatagaagaggccaagactgcgttcctgctcaacatccagctctttgaggagttgcaggagctgctgacccatgacaccaaggaccagagcccctcacgggcaccagggcttcgccagcgggccagcaacaaagtgcaaggtgagagcatccaggaaggggcacttcctctgggctacacatggagggacttggctgtctgactgtagtatctctattcctctgttttctgaatg

SEQ ID NO: 36091 - DNA, 401 bp, Homo sapiens
taaacaggtaccatacaagaaggccagaagtgcacctcctttacttaaaaggaaaccccagagtggattatatgcgtcagttaggagctcaggctatggcaaacccagttcaccactcaagatgttttctactcttgaaaagaaaacttcagaggacattataaaaagcaaaaacttgagatcgatttctacctccaatcaacctaggaaaaaaggattccttaggatactgtggtgagaacaaggagaagaaattacttatgtttaaaagagttcaggaagcagaggataaatggaggggtgcgcaagccctaattgagcaaattaaagccacattctcagaaaaggagaaagaactagaaaataagttggaagaactaaagaaacaacaggaaaaagaa

SEQ ID NO: 36092 - DNA, 346 bp, Homo sapiens
gcagcaggcgcagcccagcctcgaaatgcagaacgacgccggcgagttcgtggacctgtacgtgccgcggaaatgctccgctagcaatcgcatcatcggtgccaaggaccacgcatccatccagatgaacgtggccgaggttgacaaggtcacaggcaggtttaatggccagtttaaaacttatgctatctgcggggccattcgtaggatgggtgagtcagatgattccattctccgattggccaaggccgatggcatcgtctcaaagaacttttgactggagagaatcacagatgtggaatatttgtcataaataaataatgaaaacctaaaaaaaaaaaaaagg

SEQ ID NO: 36093 - DNA, 428 bp, Homo sapiens
  misc_feature (1)...(428): n = A,T,C or G
cccacgcgtncgcttngacctcatcgccattgtggcaggcctggaccagacagtcctctactgcgatttcttctacctctatatcaccaaagtcctaaaggggaagaagttgagtttgccggcatagccccggtcctctccatctctctcctcggcagcagcgggaggcagaggaaggcggcagaagatgaagagctttcccatccaggggtgacttttttaagaacccacctcttgtgctccccatcccgcctcctgccgggtttcagggggacagtggaggatccaggtcttgtggagctcaggacttgggctgtttgtagttctttgccttttagacaagaaaaaaaaaaaaaaggggcggccggtctaaaagatccttgaaggggccaaagcttacccgtgctggcgaggaatagttttttctt

SEQ ID NO: 36094 - DNA, 405 bp, Homo sapiens
  misc_feature (1)...(405): n = A,T,C or G
agcctatgagccccccgcggctgcggcgcaagtgccctcggcctgagtcgggatggagctgcctgctgtgaacctgaaggtgattctcctaggtcactggctgctgacaacctggggctgcattgtattctcaggctcctatgcctgggccaacttcaccatcctggccttgggcgtgtgggctgtggctcagcgggactccatcgacgccataagcatgtttctgggtggcttgctggccaccatcttcctggacatcgtgcacatcagcatcttctacccgcgggtcagcctcacggacacgggccgctttggcgtgggcatggccatcctcagcttgctgctcaagccgctctcctgctgcttcgtctaccacatgtaccgggagcgcggtggtgagctccn

SEQ ID NO: 36095 - DNA, 465 bp, Homo sapiens
  misc_feature (1)...(465): n = A,T,C or G
attgaacgcctgcggnattggtacgccttgccgggtcgacccacgcgtccgattttgtttgcttgacaacaccaattaactagatatttgtctggggttgggaagaaataacagctgttggtcttattcacactttcctcaatctgttaaggaatgaatttgtcttatttaaccagtggtttcagcatggctgtttgtttttgtcttttataccattagccatggcatgtatttgagaattagttttttagtgtaattctaaagtccgatggaggacccctctctccatgaccctggaacctcccagatgtgcttcacctccgacttgtttctgttccagatctagtagggctgccaggaagcggagtctgtgaattgagccattggagaagactgtccaagaccttctttgatgtggtttctcattctcgcagaattattttgtcttatgatcacagtgatgtn

SEQ ID NO: 36096 - DNA, 430 bp, Homo sapiens
gaaaaggtcccggagagctgagcagtcaagatgtgtgacttcaccgaagaccagaccgcagagttcaaggaggccttccagctgtttgaccgaacaggtgatggcaagatcctgtacagccagtgtggggatgtgatgagggccctgggccagaaccctaccaacgccgaggtgctcaaggtcctggggaaccccaagagtgatgagatgaatgtgaaggtgctggactttgagcactttctgcccatgctgcagacagtggccaagaacaaggaccagggcacctatgaggattatgttgaaggacttccggtgtttgacaaggaaggaaatggcaccgtcatgggtgctgaaatccggcatgttcttgtcacactgggtgagaagatgacagaggaagaagtagagatgctggtggcagggcatgaag

SEQ ID NO: 36097 - DNA, 404 bp, Homo sapiens
actccctctcccctctgagcctcagttttctcatctgcagagtggggacggtaacaccctttgtcgtagagtttggaggatgcaatgagtttgaaagatgatgacagtggggaccatgatcagaatgaagaaaacagcacacagaaagatggtgagaaggaaaaaacggaacgagacaagaatcagagcagtagcaagagaaaggctgttgtccctggaccggcagagcatcccctgcagtacaactacactttttggtactccaggagaacccccggccgtcccacgagctcacagagctatgaacagaatatcaaacagattggcacctttgcctctgtggagcagttctggaggttttatatccacatggtacgtcctggggacctgacaggccacagtgg

SEQ ID NO: 36098 - DNA, 431 bp, Homo sapiens
  misc_feature (1)...(431): n = A,T,C or G
atggcggttggcaagaacaagcgccttacgaaaggcggcaaaaagggagccaagaagaaagtggttgatccattttctaagaaagattggtatgatgtgaaagcacctgctatgttcaatataagaaatattggaaagacgctcgtcaccaggacccaaggaaccaaaattgcatctgatggtctcaagggtcgtgtgtttgaagtgagtcttgctgatttgcagaatgatgaagttgcatttagaaaattcaagctgattactgaagatgttcagggtaaaaactgcctgactaacttccatggcatggatcttacccgtgacaaaatgtgttccatggtcaaaaaatggcagacaatgattgaagctcacgttgatgtcaagactaccgatggttacttgcttcgtctgttctgtggtggntttactaa

SEQ ID NO: 36099 - DNA, 405 bp, Homo sapiens
  misc_feature (1)...(405): n = A,T,C or G
atctggggattccgagaatgatcccaggacctagatcctatagattccggcagctcttcctgcaaacacaagcccttgttgtgtgcctgagccttgctctccggcctggagacatccatctgcccactctcctaggaactgctgattaccaggaagcaccatcggctctgctgccctccccctggcagagaggcacaatgaccacattatttctcttccagcttcacgttacagcatggaagctgttgccaagtttgatttcactgcttcaggtgaggatgaactgagctttcacactggagatgttttgaagattttaagtaaccaagaggagtggtttaaggcggagcttgggagccaggaaggatatgtgcccaagaatttcatagacatccagtttcccan

SEQ ID NO: 36100 - DNA, 437 bp, Homo sapiens
ttttttttttacagacttcacagagaatgcagttgtcttgacttcaggtctgtctgttctgttggcaagtaaatgcagtactgttctgatcccgctgctattaaaatgcattgtgaaacgactggagtatgattaaaagttgtgttccccaatgcttggagtagtgattgttgaaggaaaaaatccagctgagtgataaaggctgagtgttgaggaaatttctgcagttttaagcagtcgtatttgtgattgaagctgagtacattttgctggtgtatttttaggtaaaatgctttttgttcatttctggtggtgggaggggactgaagcctttattcttttccagatgcaaccttaaaatcagtgacaagaaacattccaaacaagcaacagtcttcaagaaattaaactggcaagtggaaatgtttaaacagttt

SEQ ID NO: 36101 - DNA, 429 bp, Homo sapiens
agtgcctcccttagcctgagctcctaaagacctcttgtacttggttgcaaactcagatctctagtctagtctagtctagtctagtcatgtgtgactgtgtactgagataccactagcccagtttgctgggtctctatgttttggaagttgggggtttaataatatttaatgtctttttaggatcataaacataaataggtttgttgatattcaggccttcagaatttaagggttttaaatatagcattcagattgtaattggtatgtttttgccatctggtccactcaattgtatatttttattttgcaaaacaacccaaaacttactttatgttgctttgttcagtaccttttgaattcccccagaagagttgttttcaaaacaaacattccacaatgaatgtcgctcttcaatggaacgtctttatt

SEQ ID NO: 36102 - DNA, 517 bp, Homo sapiens
  misc_feature (1)...(517): n = A,T,C or G
nttgttgacgtcgtagaccggccggaattcgtttaagaccaccgccccgcgagatcagcctggccaacgtgaagaaaccccatctctatatttttacaaaaatgagccgggcatggtggcacacacctgtaatcccaactattttggaggctgagacaggagaattgcttgaactcaggaggcagagattgcagtgagctgagatcgtgccactgcactccagcctgggtgacagagtgagactccatctcaaaaaaaaaaaaaaaaaaaccttttatttttaaaattttttaaaatttttggggaccaaaagggggggacgggggaaaataaaaattttttttagagccctaataaaacctgccggggaataagggatccctgccccccattttttatagccttgcccagcaaaaggatgtttgggtcaagaaaggaccaaataaacaggggccccacaaaattatatgggggcggaaaagttcttatacccgattgtgggaaccctaccacaggg

SEQ ID NO: 36103 - DNA, 288 bp, Homo sapiens
acagatatggcgaaattagaggagtgcgtcagaagcattcaagcagacggcttagtctggggctcatctaaactagttccagtgggatacggaattaagaaacttcaaatacagtgtgtagttgaagatgataaagttggaacagatatgctggaggagcagatcactgcttttgaggactatgtgcagtccatggatgtggctgctttcaacaagatctaaaatccatcctggatcatggcatttaaataaaagattgaaagattaaaaaaaaaaaaaaaaaaaagg

SEQ ID NO: 36104 - DNA, 411 bp, Homo sapiens
  misc_feature (1)...(411): n = A,T,C or G
atcagcagggcagtccactcctagccccggcatcctgctctagggcccctcatgccccaggctggagcagctctcctaggtcacagcctgctgggctgggtcgcgtagcccagggtggaggcagaacgatgctgctgtggtagccctttgcctttcatgcccatgcttgattcttgcacctcagcagctgaaggtctcagagaccagtaatcagaaggcatccgactgcattaagtgtgcagcgctgaaaagacatttacaactaggccagggattagccactgtgggagggtggacaggcaatggttcagtggcctggctgttggcaggaactccaagtgcccaggcctcttgggcagcttagggccctgcctctgtttcatgatgcatgggtcatttgtcttgggtgcn

SEQ ID NO: 36105 - DNA, 407 bp, Homo sapiens
  misc_feature (1)...(407): n = A,T,C or G
aataagaagaaagagaaggagccagacgaagagctctatgacttgagcaaggttgtcttggctgggggcgtggcacctgcactgttccgggggatgccagctcacttctcggacagcgcccagactgaggcctgctaccacatgctgagccggccccagacgccacccgaccccctcctgctccagcgtctgccacgggccagctccctgtcagacaagacccagctccacagcaggtggctggactcgtcgcggtgtctcatgcagcacggcatcaaggctggggacgcactctggctgcgcttcaagtactacagcttcttcgatttggatcccaagacagaccccgtgcggctgacacagctgtatgagcaggcccggagggacctgctgctggaggagattgn

SEQ ID NO: 36106 - DNA, 516 bp, Homo sapiens
  misc_feature (1)...(516): n = A,T,C or G
tggtcacgggaaaaagnaaatccctatgacctcgatacctangacgtcgnaaagncncnaannnngggncgaccacgcgtgcgcccacgcgtacgcgttacaccatttttctgactgccatttacgagagcctcctgtcgctgagccctgacgtgcgcgtgccatccgaccatggagggactgagtccagcccaggctggggctccttgggaccctggagcctgagcccctccgactccagcccgtctggggtcaccttccgcctgcctggccgctccaccagcctagtggagggccgcagctgtggctgggtgcccccaccccctggcttcgaaccgatggctccccgcctgggccctgagctgtcaccctcacccacttcgcccactgcaaccttcaccaccccctcgcgttacaagactgagctatgtcggaccttctcagagagtgggcgctgacgctacggggccaagtgccagtttgcccatggcctgggcgagctgcgccaggccaatg

SEQ ID NO: 36107 - DNA, 471 bp, Homo sapiens
  misc_feature (1)...(471): n = A,T,C or G
natcgatcgccctcgganattgatggccatngagggnncacccacgcgtncggtggaggaggacatgaaggcctttgggtgccatgatgggaggtggtggaaggttttgacctgtccaccttcctgtttcctccttgaagctgaggcatacgtcagtgggatgctcttttgcctgggtatatttctctccttttacctgctgaccgtcctcctggcctgctgggagaactggaggcagaagaagaagaccctgctggtggccattgaccgagcctgcccagaaagcggtcaccctcgagtcctggctgattcttttcctggcagttccccttatgagggttacaactatggctcctttgagaatgtttctggatctaccgatggtctggttgacagcgctggcactggggacctctcttacggttaccagggccgctcctttgaacctgtaggtactcggtcccgagtggn

SEQ ID NO: 36108 - DNA, 401 bp, Homo sapiens
ccttgttccaaaaattggaaaatgaccagattgaaagtttaaggcagcgctttggagggggccaggtgagaaagctaaaggctgtgccctcgctccacaacagccacagcatcacttccctaatttccctaagtagtcctcacccatcactctttccatcttttggccctgccgcttcctcacttacagtttttctttcctgtcttaactagaagagaccttcgacttaaaggtaaccactttccctctgagatgctgtataaaactggaggttaggggatatttatggttgctggtgataactttgttgttctccaggcaaaaacgtccccgaagccagcagttgtagagactgttacaacagccaagccacagcagatacaagcgctgatggatgaagt

SEQ ID NO: 36109 - DNA, 409 bp, Homo sapiens
  misc_feature (1)...(409): n = A,T,C or G
tatcgcagcgtcggatgttcagagcagcagaagccggcgtcgtcggatgttgtgttgcccgccaccatgagctacacaggctttgtccagggatctgaaaccactttgcagtcgacatactcggataccagcgctcagcccacctgtgattatggatatggaacttggaactctgggacaaatagaggctacgagggctatggctatggctatggctatggccaggataacaccaccaactatgggtatggtatggccacttcacactcttgggaaatgcctagctctgacacaaatgcaaacactagtgcctcgggtagcgccagtgccgattccgttttatccagaattaaccagcgcttagatatggtgccgcatttggagacagacatgatgcaaggaggcgtgn

SEQ ID NO: 36110 - DNA, 425 bp, Homo sapiens
gcgcccacgcgtccgcccacctatcccaagtagcttgtaatacagacatgagccataacacctgactaatttttaagattttgtgtagagacggccataaataaaatagccataatcctggctaatttttaaaattttttgtagagatgggggtctcactatgtttcccaggctagtctctaaactttaggactcaagcgatcctcccacctcagtctcccaaagtgttgggattacagttgttagccaccatgcccgactgaactttttttactaccaaaatagcagaagatgaaagataaacggaagaagaggtctgaaactaaagtcttgccatgtgtgggatttgtgagtggggagcagtattagtttatctgttagtagaaataagtattggaaatatgtgaagtgtcttgcctagactt

SEQ ID NO: 36111 - DNA, 406 bp, Homo sapiens
  misc_feature (1)...(406): n = A,T,C or G
gagaagccaattggagaaattagcatttaaagataaaagactggatgttgaatttgttctctcagcacctatttctgaatggaatggcaaacagggacatatttcaccagctcttctttctgaatttttgaaaagaaatttggacaaatccaaagttctcgtctgcatttgtggaccagtgccatttacagaacaaggagtaaggttgctgcatgatctcaacttttccaaaaatgagatccatagttttacagcataatgaagagctgtcattgtcctttattcaactagtttatctaaatttgtgattgcttagggttttttaagagaacatttttgtacataacaaaaggttaactagaatccagccttcagtttcttaaatgaaatcaaatgttccttcagn

SEQ ID NO: 36112 - DNA, 414 bp, Homo sapiens
  misc_feature (1)...(414): n = A,T,C or G
gctgctggagcggcgcccgccgcggctcagcgcattcccgctctccgcttccctctccgctgcgtccccgcgcgaagatggcaaccgaggggctgcacgagaacgaaacgctggcgtcgctgacgagcgaggccgaaagcctcaagggcaagctggaggaggagcgagccaagctgcacgatgtggagctgcaccatgtggcggagcgggtggaggccctggggcagtttgtcatgaagaccagaaggaccctcaaaggccacgggaacaaagtcctgtgcatggactggtgcaaagataagaggaggatcgcgagctcgtcacaggatgggaaggtgatcgtgtgggattccttcaccacaaacaaggagcacgcggtcaccatgccctgcacgtgggtgatggcatgtgctn

SEQ ID NO: 36113 - DNA, 175 bp, Homo sapiens
agacttgaaggagcatgcatccggaactgatgaagtatggaagagaaactgaacaactaaacacactcagtagaggagatggaagacagaatctcttttcttttgattcagaagttcagagggtggacttttcaggaattgaacctgatataaaagcctttaagaaaaatgcaat

SEQ ID NO: 36114 - DNA, 410 bp, Homo sapiens
ctctgtccccacaggctggagtcagtggcacaatctcagctcactgcaacctccgcctcctgggttcaagcgattctcctgcctcggcctcttgagtagctgggattacaggcgcctgctgccatacccacctgatttttgtatttttagtagagatgaggtttcaccatgttggccaggctggtctcgaactcctgacctcaagtgatttgcctacctcggcctcccaattgttgggattagaggcgtgagccaccgcgcccggccaagatcaaacaacttaataaatgtttgttataatgacttagtgccatttgaaaaaaaaaaaaaaggggggcccgttttaaagaacccttgggggggccaagcttaacgggggttggggaggtaatatttttttccttatgggg

SEQ ID NO: 36115 - DNA, 379 bp, Homo sapiens
aacaagccttcaggttcctggagcgacgcgcccggcggacgtactattcacttccccagaacgccacagcccaggctttcttcttagtgggcttcccagaccaagaaggaaaacctttcatccgaaagtactgaggggaggacggtggcctgaagatatctcagtgccgctttgtttcccaccccaaccgaacagcccttcctcagcgccctttaacccttgcagatcggatggagaaagctgccaccacattctatggatgggggcagattgaggagcgggagggagtagtctttgtgtaactttataccagtaccagactatgttaatttaatgtagcattataataaatcttaggcctgtaacttattctcccaag

SEQ ID NO: 36116 - DNA, 439 bp, Homo sapiens
gaagaaatccctgggcctcttccccttacccggcccttagatttcatggagcagccacttagcattgaattgcactaccctgagctaaacgtgtctgtgctttctaagataagagcttgatccctttcttctatcttaagacagcacctcctgaaaagaatcgaagttgtcacaactctcacttattttttaaatactgcatagattgagttttggtttattaccaacccttcccagaattgcgttggatctaaaactactagatctcatcccattcccatgtaaattaccacagaccgcagtaccggggctggagcggagtgaagctgtctgctgtgagaggagtggccatgtgagggcatggagtcattagtctcacaaacacactttggactgaagaggatcatttctttttgttcgtgaggtcactgtccaggcc

SEQ ID NO: 36117 - DNA, 419 bp, Homo sapiens
  misc_feature (1)...(419): n = A,T,C or G
aggaaaaccaatgccagnactattaactcctcttcctccgaaaaaatgaaaacaagaatgtaggaagggaaaggaattatacagcttaaactaatgaagcagaaaggacaaactcaattttgaacccactgaatttgccacaaatattgtagaaaatattctcaaggactttacagttgtctactttgattggcacatggttcatacaacagtatttgtgtcaaggcacatcttactgttttctggcggncttcctctttccattgattttgtcatgatggttgattttcgttgtcaccttcctcttacggattttagctctaacttttgtttccacatgtctccgtagagtaatgacgtctttcaggccaattttatttcctcgaaaggaagaaactcttttctttgtgtgcatacan

SEQ ID NO: 36118 - DNA, 422 bp, Homo sapiens
acaaagggacttacaaaggtaaaaatgcatttgcaatagggagaaaatgaaggccaaacaaaagcaggctccagcttatgcgagaaacttggatgtcacaaatgtccctgaacagaaaatgaagctcacttcagaacacacactctgtgccttgaaaactaaagagactattacttccttttcacatgaccacaagtcctctgatggaaatgtacagcagaaactcttgagagagaggctaaaagcaactctgttctcccccttcccctagacttttcttacgaaaagtcaataattaagcaaattgcttaacacttggttccagttcctgcctatctggagtttaaatgcgtaatacaccattaatttccacgctgcagtttttattttaaagaaagtaacaagatgtctttacactgaca

SEQ ID NO: 36119 - DNA, 407 bp, Homo sapiens
agaaatgagggcaatagaatagaaaatgaaactccacgatgacgttctcattcccccagtcctaggcgttctagaagatcaagctcaagtcacagattgcgtcggtctcgaagcccaatgcattacatgtataggccgagaagtcgaagtccaagaatttgccatcgctgcatttctagatacagatccagatccagatcccgttcaccatatggaattagaaatccatttagaggtaggccaaaatgctttcgatcaggtagccctgagaggatgtctaggagatcagtgagatcatcacatagaataaaagcattagaagatgtattacaacgatctgggcatgggacagaatttaataaacagaggcatcttgaagctggtgataagggacattcaccagcact

SEQ ID NO: 36120 - DNA, 421 bp, Homo sapiens
  misc_feature (1)...(421): n = A,T,C or G
acgcagatcatctgggggaaacaagaccaggtgctggatgtgtctggggcagacatgttggccaagtcaattgccaactgccaggtggagcttctggaaaactgtgggcactcagtagtgatggaaagacccaggaagacagccaagctcataatcgactttttagcttctgtgcacaacacagacaacaacaagaagctggactgaggccccgactgcagcctgcattctgcacacagcatctgctcccatcccccaagtctgacgcagccaccactctcagggatcctgccccaaatgcggtcggagcgccagtgaccctgaggaagcccgtcccttatccctggtatccacggttccccagagctttggggaccacgcgaaaacctccaagatatttttcacaaaatagaaactcatn

SEQ ID NO: 36121 - DNA, 415 bp, Homo sapiens
caagatatcaccattgccctcgacaacgggcatcaagatcgtactccgtctcaaactttctgcctccttggaaagctctacatctccttgtgattggagtgcgggtaacaagattccttaatgaggaaaaaaagcaagaacagaagccctagtcatgaacgatagagaagcaaatgtttggaacggaagcgaagtggagacaaaaaaaaaaaaaagggcggcccccccaaaaaaaaaattggggggttcccttttggcggccaaatggaacttaaacccttttccattttgggggggttttaaaatttgaagggggggcctttggaaagggacctttatttttgtgccgggaaaaaagggccaggggggccgccaaattttaaaccctaaactttaaaaaaacttttgggggggg

SEQ ID NO: 36122 - DNA, 426 bp, Homo sapiens
aggcgctgagcttaaactgaagcaagttcggtggactccggcggcgccctgatctaaagaaacgactcagggactgcggcgcttgcacgtcaacgggaggtgtgagcccaaagaaatgggacgtcggtcatcagatactgaagaagaaagcagaagcaagagaaaaaagaaacaccgtagacggtcctcctcgagcagttcttcagatagtagaacatacagccgaaagaaaggaggaaggaaatcaagatcaaagtcaagatcttggtccagagatcttcagcctcgttcacattcttatgatagaagacgcaggcatcgatcaagcagtagctcttcttatggctccagaaggaaacgaagtcgaagtcgttcaaggggtcgagggaaatcctatagagttcagaggtctaggtctaaaagcat

SEQ ID NO: 36123 - DNA, 414 bp, Homo sapiens
tgagatgtgtgggtttttgccattggacaaagaatgaggttagaagactgcagcttggagtctctctaggttttcaactatttcttcacaatttgaacacttgacggttgtcccttttaatttatttgaagtgctatttttttaaataaaggttcatctgtccatgcagtcctcttggattctctgaatgtagtaactatgaagctatgccaaaggtaggcagaaaatgggcttgggagccagacactccagggatcagtagttcctacccatagtctttgtgtgcttgctaaatggtgtacatttcttgttaaccacgttattaaaacttgatcagcacataagctttcttctgttagatcttttggcagcaaacaaccttccccccaaacctctgaattttgggggtgtggg

SEQ ID NO: 36124 - DNA, 411 bp, Homo sapiens
cccacgcgtccgcactaacaggaaacacttctcaccccctcacacaggcccaggggagcccctggagggaaattccttggcaggggaacaggaaatgtggccgcctctgccccactgccagcctgagtgggcaaggaagcaggtggatcccccagaaggaaccgcagctcgcgaggcacctctcctcgtccccacccacccccacatttgcacaccttccacagggtcaggatggagtagctgccttgcgaggtggtgagactcctgtctctggaggtctgcaagcactggtagtgatattgcagcagacaaggtctgggttgggcgtctgcaggaggacaccttgtgggacatctgaggacatccgcaaattcttgtcagcctgtgaactatgccctgcctctgtcacct

SEQ ID NO: 36125 - DNA, 479 bp, Homo sapiens
  misc_feature (1)...(479): n = A,T,C or G
cgagagntgnnnnnaactgaagnnccatganaaggctngaanncncggnnganccacgcgtncgggtttactcacgtcatccagcagagaatggaaagtcaaatttcctgaattgctatgtgtctgggtttcatccatccgacattgaagttgacttactgaagaatggagagagaattgaaaaagtggagcattcagacttgtctttcagcaaggactggtctttctatctcttgtactacactgaattcacccccactgaaaaagatgagtatgcctgccgtgtgaaccatgtgactttgtcacagcccaagatagttaagtgggatcgagacatgtaagcagcatcatggaggtttgaagatgccgcatttggattggatgaattccaaattctgctcgcttgctttttaatattgatatgcttatacacttacactttatgcacaaaatgtanggttataataatggtaacatgg

SEQ ID NO: 36126 - DNA, 409 bp, Homo sapiens
  misc_feature (1)...(409): n = A,T,C or G
agctggatgtgacaggatcaattaggaggaagctgttgattctggcatggctttatgggatgtgttcatttcctgtggctggggtaacacattaccacaagcagaggggcttaaaacaacagaaacgtgttctatcccagttctggaggccagaagcccaaggtcagggtgtcagcagggccacgctctctctagaggctggagggaaggcctcttcgttgcctcttccggccggtaaccccaggcttcaggtggcatcgctccagggtcttcctccatcccgcagctgtcttccctctgtgtgtgtctccacatggcattctctctgtatctttgtgtctgtgcttataaggacatcagtaattttggattaggccccattttcctgacctcatcttactacaattgn

SEQ ID NO: 36127 - DNA, 392 bp, Homo sapiens
tttgccgccagaacacatgtgtcgtgaaaactacttctaaaagccaaaatgggaaaggaaaagactcatatcaacattgtcgtcattggacacgtagattcgggcaagtccaccactactggccatctgatctataaatgcggtggcatcgacaaaagaaccattgaaaaatttgagaaggaggctgctgagatgggaaagggctccttcaagtatgcctgggtcttggataaactgaaagctgagcgtgaacgtggtatcaccattgatatctccttgtggaaatttgagaccagcaagtactatgtgactatcattgatgccccaggacacagagactttatcaaaaacatgattacagggacatctcaggctgactgtgctgacctgat

SEQ ID NO: 36128 - DNA, 403 bp, Homo sapiens
agctttctacagagagaaggaaacaataaattctgtcttgtatgacaaatcacaaaaggcttcacataggaaatgttatttggcccacattttgaaaaatgagtacgaatattcttggaggtagcaacatggtattcaatggcacagaagcatcaaaaagtatgcttctggatcatactttgatttgctgtggctgaagcacagggtataagcgaacatttaattggctggagccaattaaatggtgaacatttaattggcttaagcggatggagccacaaatagagaggctagaggcaaagctgataaaataggacctgattgtggagggactcatatcatatgccatgataaagaattggggtctgattatttcggcactgagaagccattacaagttaag

SEQ ID NO: 36129 - DNA, 413 bp, Homo sapiens
  misc_feature (1)...(413): n = A,T,C or G
cagacgcgtgggcggacgcgtgggcggacgcgtagactgagaggtattgcaaccatggctacggtcgccggtgcgacctactactaacgaggcagtatgtactgggtcacagtcatcaccctgatctatggctactacgcatgggtaggcttctggcctgagagtatcccttatcaaaaccttggtcccctgggccccttaactcagtacttgatggaccaccatcacacccttctgtgcaatgggtattggcttgcctggctgattcatgtgggagagtccttgcatgccatattattgggcgagcgtaaaggcatcacaagtggccggtctcaactactgtggttactacagactttgttctttgggataacgactctcaccatctttgatgcttacaaacggaagcgccn

SEQ ID NO: 36130 - DNA, 435 bp, Homo sapiens
tcacagaagagaccgactcctttgtgaataagctagatcccagcaaagtgtttaagagcaagaacaagatcgtaatcccaaaaaagaaagggcctgtgcagcctgcaggtggccagaaagggccctcaggaccctccggtccctccacttcctccacttctaaatcctcctctggctctggaaaccccacccggaagtgagcacccctccctccaactccctaccagctcgagtggtggtttccatgcacagatggccctaggggtgacctccagttttgcgtgtggaccgtaggcctctttctagttgaatgaccaaaattgtaaggcttttagtcccaccgacattagccaggctcgtagtgaggcctccagagcaggttgtgctgtcccctgcctctagaagcaatggggaatttggaatcttgtgtaagtg

SEQ ID NO: 36131 - DNA, 392 bp, Homo sapiens
  misc_feature (1)...(392): n = A,T,C or G
ccaagatgccgaaaggaatgaaggccaagggaaagaaggtggctccggccccagctgtcgtgaagaagcaggaggctaagaaagtggtgaatcccctgtttgagaaaaggcctaagaattttggcattggacaggacatccagcccaaaagagacctcacccgctttgtgaaatggccccgctatatcaggttgcagcggcagagagccatcctctataagcggctgaaagtgcctcctgcgattaaccagttcacccaggccctggaccgccaaacagctactcagctgcttaagctggcccacaagtacagaccagagacaaagcaagagaagaagcatagactgttggcccgggccgagaagaaggctgctggcataggggacgtcccn

SEQ ID NO: 36132 - DNA, 409 bp, Homo sapiens
  misc_feature (1)...(409): n = A,T,C or G
gccacgtcgcccagaatgcaggcctttctcggggggccgtcaggagaagtagggggtgatcctgggtaacttggggcacaggctggtgcagccctctccaaggatggcatctcttgaggttttacattgaattccatgatatagcatatttttaaaaatatgaaaatgatgttcataataaccaactggttgaattattattttttgctgttctcaccctccaaccctcaaatacaatcgatcctccatgaagtggcgccactgtggttcagaacactttacactttgcttagagggtgctccacctggaagggcctgagctcctaaacaatcggtaatgcagtgataaagcgttaacttccaactatcaaaaagtacctgactcattcattccaactggagctcatcn

SEQ ID NO: 36133 - DNA, 409 bp, Homo sapiens
  misc_feature (1)...(409): n = A,T,C or G
tcgtgaaatatgtgaacccgtgcgcccacggtcatggtggctgctcccctcatgccaactgtaccaaggtggcacctgggcagcggacatgcacctgccaggatggctacatgggcgacggagagctgggccaggaaattaacagctgtctcattcaccacggtggctgccacattcactccgagtgcgtccacactggccacgagcaggtctcctgtaggtgccgtgagggttacagcggggatggcatccggacctgcgagctcctggacccctgctctaagaacaatggaggatgcagcccatatgccacctgcaaaagcacaggggatggccagaggacatgtacctgcgacacagcccacaccgtgggggacggnctcacctgccgtgcccgagtcggtctgaa

SEQ ID NO: 36134 - DNA, 401 bp, Homo sapiens
  misc_feature (1)...(401): n = A,T,C or G
cacctcagcctcctgactagctggggctacaggcgcacattaccacaaccagctaattttttggtagagatggggtctggctatgttgcccaggctggtctcaaattcctgggctcacgcagtcttctggcctcagcttcccaaagtgctgggattacaggtatgagccactgtgcttggcctaaaagtttattacatgatagatctctgaataccttgtgagtctcttctctgatagtttattcgagttattttatgtttccttgggacaaatttgaaacatatttttctaactggtgatttcctttaggttttctcattagtttctatgatattaaatgttacagttgcttataatttcattcatcagtgaagagtctgtgattatctcctttttcatn

SEQ ID NO: 36135 - DNA, 404 bp, Homo sapiens
gcacagatcctgaagatgtcatcagaaatgcctttgcttgctttgatgaagaagcaactggcaccatacaggaagattacttgagagagctgctgacaaccatgggggatcggtttacagatgaggaagtggatgagctgtacagagaagcacctattgataaaaaggggaatttcaattacatcgagttcacacgcatcctgaaacatggagccaaagacaaagatgactgaaataacttcaaattccagccaaacgttccttgttgccactttgggtattctgagattttctcttgcatgcccttagctttacagcttttgcatttcctgttgcatttattctcagccattttgggcatatgtatctttataatcagactggaaacgggactttctattaat

SEQ ID NO: 36136 - DNA, 416 bp, Homo sapiens
tacaatgttgggtgtgtcaggtctcatgtgtctaaacttaatttaactaatgttacatatattggttttcatccattgttcctggcttgtaactcccatagcccttgttaaagtctttttgttacaatgttgggtgtgtcaggtctcatgggcaggcctcaggaaacagaatttctcagactttctcctatccatctctcatctgccccaagacaagaccctataatcttccctgcctttctgattgggagttataagaccctcctcagagggcgtcccaccctatccttggaggaaggaatgctgatattttgaaatttccataaaaacccaggaggactaggttccagaagcttcaggatggctcaacacgtggaggttcttggagggtggcctgcacaggaagggcatataag

SEQ ID NO: 36137 - DNA, 405 bp, Homo sapiens
cccacgcgtacgcggacgcgtgggggcgtttcccacttacgggacagatctggaagcatctttgctaagttttgaaaaacttgaccgtgcctcaccatatctttggccagaacaattaccaggtgttgctgaatttgcagcttccttcaaaagtcctattactagttctccacccaaatggatggctgagatagaacgtgatgacatcgacatgttgaaagccacagagatgacacgggggaaattcctcaatattctagagaagcccaagaagtagcagctgcttgcggacaggatgtcctggggtccgaaaccaagctcccttcccggtgcacctctaacaatgcacacctcactgcttgcttgggagaggccagagggtgtacctccacgactgtcctctcg

SEQ ID NO: 36138 - DNA, 407 bp, Homo sapiens
acaactgtgttcactagcaacctcaaacagacaccatggtgcacctgactcctgaggagaagtctgccgttactgccctgtggggcaaggtgaacgtggatgaagttggtggtgaggccctgggcacgctgctggtggtctacccttggacccagaggttctttgagtcctttggggatctgtccactcctgatgctgttatgggcaaccctaacgtgaaggctcatggcaagaaagtgctcggtgcctttagtgatggcctggctcacctggacaacctcaagggcacctttgccacactgagtgagctgcactgtgacaagctgcacgtggatcctgagaacttcaggctcctgggcaacgtgctggtatgtgtgctggaccatcactttggcaaagaattcacg

SEQ ID NO: 36139 - DNA, 422 bp, Homo sapiens
  misc_feature (1)...(422): n = A,T,C or G
aacagggctcaaggagcctctttccttccatgttacctggatcgcatccttttacaaccattcctggaaacaaaatctggtctcaggttggctgagtgatttgcagactcatacctgggacagcaattccagcaccatcgttttcctgtgcccctggtccaggggaaacttcagcaatgaggagtggaaggaactggaaacattattccgtatacgcaccattcggtcatttgagggaattcgtagatacgcccatgaattgcagtttgaatatccttttgagatacaggtgacaggaggctgtgagctgcactctggaaaggtctcaggaagcttcttgcagttagcttatcaaggatcagactttgtgagcttccagaacaattcatggttgccatatccagtggctgggaatatggccn

SEQ ID NO: 36140 - DNA, 433 bp, Homo sapiens
  misc_feature (1)...(433): n = A,T,C or G
cggacgcgtgggtgagcaattgagttgattttctttgcttttttcctcttatggagctctcagtgtgtgaaagttctaaagccacaagaatcaatgatgttttagctgctaatatttagtattgatcgtttcttttaaaaatgatttggggaacttgatctgtactgtaattttactaattccttgtgcagaggtgggtatggcaattagaagtcaagaaatgggttgtttagcttggtttgtttccctaacttctgattaactctctgtatgacaactctacagaagttgtgcgcgtgctttctcagcagcatttttccttcaaaatcatctttttaatcaacagtcattaataaatgtacatgtacgatattcaaactttacaatttcagctggtntttctatgctcatcttatgttcgttactaatgaag

SEQ ID NO: 36141 - DNA, 407 bp, Homo sapiens
  misc_feature (1)...(407): n = A,T,C or G
cccacgcgtccggcaagatggcgggtgaaaaagttgagaagccagatactaaagagaagaaacccgaagccaagaaggttgatgctggtggcaaggtgaaaaagggtaacctcaaagctaaaaagcccaagaaggggaagccccattgcagccgcaaccctgtccttgtcagaggaattggcaggtattcccgatctgccatgtattccagaaaggccatgtacaagaggaagtactcagccgctaaatccaaggttgaaaagaaaaagaaggagaaggttctcgcaactgttacaaaaccagttggtggtgacaagaacggcggtacccgggtggttaaacttcgcaaaatgcctagatattatcctactgaagatgtgcctcgaaagctgttgagccacggcaan

SEQ ID NO: 36142 - DNA, 470 bp, Homo sapiens
cggacgcgtgggcgcggtcgtaagggctgaggatttttggtccgcacgctcctgctcctgactcaccgctgttcgctctcgccgaggaacaagtcggtcaggaagcccgcgcgcaacagccatggcttttaaggataccggaaaaacacccgtggagccggaggtggcaattcaccgaattcgaatcaccctaacaagccgcaacgtaaaatccttggaaaaggtgtgtgctgacttgataagaggcgcaaaagaaaagaatctcaaagtgaaaggaccagttcgaatgcctaccaagactttgagaatcactacaagaaaaactccttgtggtgaaggttctaagacgtgggatcgtttccagatgagaattcacaagcgactcattgacttgcacagtccttctgagattgttaagcagattacttccatcagtattgagccaggagttgagggtgaagtcaccattg

SEQ ID NO: 36143 - DNA, 385 bp, Homo sapiens
gcgcctcggaggcgttcagctgcttcaagatgaagctgaacatctccttcccagccactggctgccagaaactcattgaagtggacgatgaacgcaaacttcgtactttctatgagaagcgtatggccacagaagttgctgctgacgctctgggtgaagaatggaagggttatgtggtccgaatcagtggtgggaacgacaaacaaggtttccccatgaagcagggtgtcttgacccatggccgtgtccgcctgctactgagtaaggggcattcctgttacagaccaaggagaactggagaaagaaagagaaaatcagttcgtggttgcattgtggatgcaaatctgagcgttctcaacttggttattggaaaaaaaggagagaa

SEQ ID NO: 36144 - DNA, 382 bp, Homo sapiens
  misc_feature (1)...(382): n = A,T,C or G
cagcagcccctgcgcgggctgtgtctgctgtgaaaaacatcaacctgccagagattcctcggaacatcaacattggcgatctcaacatcaaagttcccaacctgtcccagtttgtctgaggatcaagtattggcctgaaatagagtccttaagacaagcaaagacaagcaaggcaagcacgtctggaaacagaacccattttgagccttagaagagtcaagcctcaggacctggaaactttgtgtctggggaagactgtttggcatggaatagggaagggattcctattgacactgctcgggtgcacccagttctcacatgtgcagtcatgccgttctctgatgcatacggccactgcagatgtgaggggccctgccttccn

SEQ ID NO: 36145 - DNA, 412 bp, Homo sapiens
  misc_feature (1)...(412): n = A,T,C or G
atggcgtgatgtctcacagaaagttctccgctcccagacatgggtccctcggcttcctgcctcggaagcgcagcagcaggcatcgtgggaaggtgaagagcttccctaaggatgacccatccaagccggtccacctcacagccttcctgggatacaaggctggcatgactcacatcgtgcgggaagtcgacaggccgggatccaaggtgaacaaaaaggaggtggtggaggctgtgaccattgtanagacaccacccatggtggctgtgggcattgggggctacatggaaacccctcgaggccaccgggccttgaagactgtctttgctgaggacatcagtgacgaatgcaagaggcgaaactatgagagaggggtgggtgtgacaataagcctatacccccactgtggggg

SEQ ID NO: 36146 - DNA, 432 bp, Homo sapiens
  misc_feature (1)...(432): n = A,T,C or G
aaatatttaccattggccaggatgagagacttgggatttgtgggcttaagacccatagtcagctcaggaagcagcatatcttagcctaatgttggtaacacctggatttcagtacatctgactcccacccaaggaggctgctgaatacacagcttttctgtgacaaactttctctaaatcagaataacagtgcttattcatccagaagggaaattattaaaagttgtcacaaggaaaacaaacatttcccaagtgtcctaaatgaaccagaaagcattcaagatagttttactcgttagtccaatttattaatcgttaattgagcacttactgtattcaaggtaatacgcgtactgcttttaggagaaataaatgagtggaactgaaatgttgccatcaaaggggtcgcagttaaatgggagtcatgttttn

SEQ ID NO: 36147 - DNA, 415 bp, Homo sapiens
aggaaactaaaggccacaagtaagtcaccagcaagccaggcattgctcagagcccctcctatctcaatgttacctatggcatctgcactgtaagccttatttaatggaatcaaatctctgcttagaatttcagttgtaacaggcaaaagaggtgttcagaatggtcccccaaaagccactgtgaagcctctgaagtccatgaggcgggcagcggtctcttctagctctgtatcaggcaaccttctgcagaagcctgggaggccctggcttgccatgtgtcacctgacttcctgctacaccacccccgtatgtcttactcaaagctcagcctgcccagtgctgatttggggcaggcaggagccaggctgccgagcactatgggtctagccctagcaccctctctactggtaacaca

SEQ ID NO: 36148 - DNA, 512 bp, Homo sapiens
  misc_feature (1)...(512): n = A,T,C or G
gcancaagangancccggnaaannnnaattgacgccgttgaacccnctcgattcccggtcgacccacgcgtccggtgcaggtcctggtgcttgatggtcgaggccatctcctgggccgcctggcggccatcgtggctaaacaggtactgctgggccggaaggtggtggtcgtacgctgtgaaggcatcaacatttctggcaatttctacagaaacaagttgaagtacctggctttcctccgcaagcggatgaacaccaacccttcccgaggcccctaccacttccgggcccccagccgcatcttctggcggaccgtgcgaggtatgctgccccacaaaaccaagcgaggccaggccgctctggaccgtctcaaggtgtttgacggcatcccaccgccctacgacaagaaaaagcggatggtggttcctgctgccctcaaggtcgtgcgtctgaagcctacaagaaagtttgcctatctggggcgcctggctcacgaggttggctggaagtac

SEQ ID NO: 36149 - DNA, 405 bp, Homo sapiens
agaggccctaccgctgggtctgcgagacagagctggacaaggccagccaggagccacctctcctttaatttatttcttcaatgcctcgacctgccgcaggggtccgggattgggaatccgcccatctgggggcctcttctgctttctcgggaattttcatctaggattttaagggaaggggaaggatagggtgatgttccgaaggtgaggagcttgaaacccgtggcgctttctgcagtttgcaggttatcattgtgaactttttttttttttaagaggaaaaagaagtttccctaaaaaaaaaaaaaaaggggcggcccttttaaagaatccttgggggggccaaagtttacgcgggcatggaaggcaatatttttttccttatggggggcggaattaaaacca

SEQ ID NO: 36150 - DNA, 400 bp, Homo sapiens
cttgaatcttgataaagatcacaatggcatgctcagtaaagaagaactctcacgctatggaacagctaccatgaccaatgtcttcttagaccgtgttttccaggagtgtctcacttatgatggagaaatggactataagacctacttggactttgtccttgcattagaaaacagaaaggaacctgcagctctacaatatattttcaaactgcttgatattgagaacaaaggatacctgaatgtcttttcacttaattatttctttagggccatacaggaactaatgaaaatccatggacaagatcctgtttcatttcaagatgtcaaggatgaaatctttgacatggtaaaaccaaaggatcctttgaaaatctctcttcaggatttaatcaacagtaat

SEQ ID NO: 36151 - DNA, 507 bp, Homo sapiens
  misc_feature (1)...(507): n = A,T,C or G
tggtccaggaanaganaaaactgaagccctngacctgagngcctcggaccggcccgaatcccggtcgacacgcgtcgttccaaagaccgcagatggcactgatccagatgggctccgtggaggaggcggaccaggccctcattgacctgcacaaccacgacctgggggagaaccaccacctgcgggtcttcttgtccaagtccaccatctaggggcacaggcccccacggccgggccccctggcgacaacttccatcattccagagaaaagccactttaaaaacagctgaagtgaccttagcagaccagagattttatttttttaaagagaaatcagtttacctgtttttaaaaaaattaaatctagttcaccttgctcaccctgcggtgacagggacagctcatgctcttggtgactgtggcagcgggagttcccggccctccacacccggggccagaccctcggtgccatgccttggtggggcctgtgtcgggcgtggggcctgc

SEQ ID NO: 36152 - DNA, 410 bp, Homo sapiens
aaagataattcctgtattttcttcacccacgtattccaaatgtgtaacactacaatcagcaaaaatcagcacattaatattattacctaatctacagacctcattcacattttgccagttgttctgctggtgtgctgtatgtagtgcaggatccagtctaggcccgtatgttgcattttgctgtcatgtcttcttagtctcctttcatctcagtggtcttttcttttccatgactatgacagaaatgatttgtatccttcatatatctgcagtcacatgaagtctatttgtcccactactggtgacgtaaattttggtaacttggttgagggtggtaccgtctaggtttctccatattaagttgctatttttccttgtgtatttaataagtatcttatagggaaatcctt

SEQ ID NO: 36153 - DNA, 511 bp, Homo sapiens
  misc_feature (1)...(511): n = A,T,C or G
aggctnccaggganccagnncttcnnnncctgacagccgttgaccgcctcgaatcccggtcgacccacgcgtccgggtttgtcatgcagctgttaagtcaggtgcagctgaggctggaacgtgtgtgatgctttggtttgttttctttcttttttttaaggacacctcgagaccgttgagtaagtgctttgttgtagtcaggtggcaactggggctggaagatgtgtggtgctttggagggtatggctaagagtctgggctcagctgggcaactgcacctccctctccttgtagcctttttgtgtagtctccagtagagtagccagatttcaagcacctccaaaagtacaaaacatgagcctgccaggcctggaattgtcacattatcacctgctgcattctatttattaagtcatagggccagctagggagcgtggttcattgggagccatttttggaaacggcctgcacattataattaatgcttctatctaccatgttgctctaccat

SEQ ID NO: 36154 - DNA, 271 bp, Homo sapiens
gcgtgcattatctatgcagcatggggtttttattatttttacctaaagacgtctctttttggtaataacaaacgtgttttttaaaaaagcctggtttttctcaatacgcctttaaaggtttttaaattgtttcatatctggtcaagttgagatttttaagaacttcatttttaatttgtaataaaagtttacaacttgattttttcaaaaaagtcaacaaactgcaagcacctgttaataaaggtcttaaataataaaaaaaaaaaaaagg

SEQ ID NO: 36155 - DNA, 431 bp, Homo sapiens
  misc_feature (1)...(431): n = A,T,C or G
atctgaatatacagaagtgaaccctgggccagccacattcagccgtaacttccccagactgtttctacaggtgcagtgtgccaatcanaagaaaggtggccaggctcaggagaaaggacaggagagtgactctggcaggcttgctccattgtagagatgagatacaccaagatagtgacttcccagcttttctccccaaagcacccctaatagctgagaagaatctggaggcatagctaccatcacagctacactaaccaccatactttactgtatccttcaggtgtctgtcctagctagttttgtggtctggctccttcagtccctgcaacaagcctgtttattttcattatattgatgaggttatagagcttggacaagttacatgacttttcgaagatcacatagctaataagtgtcaagagtcttat

SEQ ID NO: 36156 - DNA, 408 bp, Homo sapiens
atacatttttttaaaacaataatgagactgacaacagaatgagatagtgaaggatggtggttaagaaattgctgaccttgaataccatatgcagtaaaaatatccttcaagtatgaaggtggaataaagatattttcaggtaaaaataagataattcatcaccagcagacatattgaaggaacttcctaagatggaaaacaataccagatgaaagccttgagttaaagattaacagaaaggataaatgagtaaatcccaataaacactgattgtaggcaataaaaatgatgccttgataggtttaacattcacaacaaaaaggcatgtaaattgggagaagggaatggaagtaaatgttctaagatccatgcactgcttaagaaggtaaaaaaatacaaattgttacc

SEQ ID NO: 36157 - DNA, 406 bp, Homo sapiens
  misc_feature (1)...(406): n = A,T,C or G
atttacagaaatgaaggggatactcatggcagagttctgaatctcaaaacactctactctggcaaaggaatgaagttattggagtgatgacaggaacacgggagaacaatgctctgtttgggctggatatttctttggcttggtgcaggagagcgaattaaaggatttaatatttcaggttgttccacaaaaaaactcctttggacatattctacaaggagtgaagaggaatttgtcttattttgtgatttaccagagccacagaaatcacatttctgccacagaaatcgactctcaccaaaacaagtccctgagcacctgcccttcatgggtagtaacgacctatctgatgtccaatggtaccaacaaccttcgaatggagatccattagaggacattaagaaan

SEQ ID NO: 36158 - DNA, 427 bp, Homo sapiens
  misc_feature (1)...(427): n = A,T,C or G
ctttctgtttcagatgaggaaattcagaaaggttaagttacttgttcagtccctgaaccctgatcttccatcttcatatccttccaaagtgggagataatctaaataggaatgaggactgcccgtttttgagtgctcatttatagttctgagcttcctggcaggcagatcaaagagggagcaaagtaactccatggaaatgtcccagcagtagacattggtaaatatggttgaggctgatgttaccaccagatgtttgattcgtagtgggatccgagttggctacaccccagatgtcctgacagataccaccgccgaactcgcagtctccctgctacttaccacctgccgccggttgccggaggccatcgaggaagtgaagaagtaagtgaacgcacaccaggtgcggtggctcacggctgtaatcn

SEQ ID NO: 36159 - DNA, 382 bp, Homo sapiens
cggacgcgtgggtaagcggtaggttgacagagctaccgtcttcctgtttttttcctccaattttccggcagttactcccagtcatgcccgagccctcaaagtccgctcctgccccgaagaaaggctccaagaaggcagtgacaaaggcccagaagaaggacggcaagaagcgcaagcgcagccgcaaggagagctactccgtgtacgtgtacaaggtgctgaagcaggtccaccccgacaccggtatctcgtccaaggccatgggcatcatgaactccttcgtcaatgacatcttcgagcgcatcgccggcgaggcttcccgcctggcgcattacaacaagcgctcgaccatcacctccagggagatccagacggccgtgcg

SEQ ID NO: 36160 - DNA, 425 bp, Homo sapiens
taaccagccctgggaagcccgcaagaggcctcagcggtggccgtccgagagccgagaggtgagggtgcccccgcctcacctgcagaggggccgttccgggctcgaacccggcaccttccggaaaatggcggctgccaggcccagcctgggccgagtcctcccaggatcctctgtcctgttcctgtgtgacatgcaggagaagttccgccacaacatcgcctacttcccacagatcgtctcagtggctgcccgcatgctcaaggtggcccggctgcttgaggtgccagtcatgctgacggagcagtacccacaaggcctgggccccacggtgcccgagctggggactgagggccttcggccgctggccaagacctgcttcagcatggtgcctgccctgcagcaggagctggacagtcggccccagg

SEQ ID NO: 36161 - DNA, 410 bp, Homo sapiens
cccacgcgtccgcccacgcgtccgcggacgcgtgggtttttttggaaacctctgcgccatgagagccaagtggaggaagaagcgaatgcgcaggctgaagcgcaaaagaagaaagatgaggcagaggtccaagtaaaccgctagcttgttgcaccgtggaggccacaggagcagaaacatggaatgccagacgctggggatgctggtacaagttgtgggactgcatgctactgtctagagcttgtctcaatggatctagaacttcatcgccctctgatcgccgatcacctctgagacccaccttgctcataaacaaaatgcccatgttggtcctctgccctggacctgtgacattctggactatttctgtgtttatttgtggccgagtgtaacaaccatataataaatca

SEQ ID NO: 36162 - DNA, 405 bp, Homo sapiens
gcgctgggagatgatcagaaatctcagggcacagcctcaggactacctggacactcatccactgttggagatgctcaacagctagacacagatgctcacagccgacctgtggcctcttgctctgaagccatcccccatcttccctagacacagcagacatctgagaaagcttcagcatttctcttgctaacagattcagaaaagtgtctcaaagcagagcacagagttatttggtgtttgctgaagacagcctttgtgccacaatcacttattaaataagcgatcaatttcccattgaactgaacatgcaacatttatcatacattcagttctcattcacactccttaagatttggtcagaatttttatttctgttcatgtcttctacttttctactcctgtatg

SEQ ID NO: 36163 - DNA, 463 bp, Homo sapiens
caataggccgtctgcaagctgaggagcaaggaagccagtagtggctcagtccgagttccaaaacctcaaaagtaaggaagccaacagtgcagccttcaatctgtgactgaaggccgagagcccctggtaaactgctggtgtaagtccaagagtacaaaagctgaaggacttgggagtctgatgttcaagggcaggaagcatccagcacagagaaagatgaaggccggaagacttagcaagtctgctcttccatcttctcctgcctgctttattctagccacactagcagctgattagatggtgcccacccagtccactgactcaaatgtcaatttcctttggcaacactcacagacacacccaggaacaataccttgcatccttcaatttaatcaagtttgcactcagtattaaccacgacatgatgcacatctgacctcaagtgtttttgatcaagattata

SEQ ID NO: 36164 - DNA, 511 bp, Homo sapiens
  misc_feature (1)...(511): n = A,T,C or G
ggagggaaaagnnnntttgagccntngaaccgacagcctcggaaccggcccggaatcccggtcgacccacgcgtccgcccacgcgtccggccagctgacagctgctgtgtactgttcggttgctgttatctgcatggccagtctcttgagtctcagcctgctgttgacccccagtcgacagtgctcgtcagcagagggtgggcacggcccagtactgcctcagggcccgtctcagtagtcccagagagacggggtatggtatgctcttgtcacttttaaagtgtatgtctgtggctcgaggcttggcattgtctctgaagtattattcctagaggcgggtatgctgacactagatcagtgggcttggttggttatgtctctgtgaactgaaaagcaaggggcagatttcaatttacaaaccagattttagatgaacttttctaattaaaagtagaattatttacataaatgacactgaaagatgtggtggctcatgcttgtaatcccaaan

SEQ ID NO: 36165 - DNA, 481 bp, Homo sapiens
gagtactgactgtcagcagtggataaaggagaggggaccctctggtccctagcatggcacccagagcctcccctcttcttgtccttcagccaaagagaaactttctctgactttgaactgaatttacgtctctggccaatgatgggcctgaaaattccataatggccagagaggagagttcgagcccggctaagatcccctgagtcattctgtgagggaccaagacccacagtccaccagccccagggccctacctcctggaatgctttcctggatccagcttcccgaagatccgaccagacccagggaggacggcaccgctccgcgggagggaaagccaaagcatggtgcttcaccagctggactcacgggcgaggggacatgggcgcttgtcaacgtgatgtcattcttttcccaccgtttcttcctgttgatattcaatgaatccagcaatctctgttgaaaaaaaaaaaaaaaaaaa

SEQ ID NO: 36166 - DNA, 411 bp, Homo sapiens
tgactttgttgcacttttagtttttttaaaaaaaacataaaacaaaaacatggcagatgcatattgtgtctggttatattgggggttttacttttacctgttttgagggggatggggccggccaagccattcagagagaacatgggtccagaggacattctcagtggaaagagtttgatctgcagcacccagaagagaagccaaactcggtgtcattctgagtgaacactcaggttggcaagaaaacatacttgaattttcattcatcttctcagcagctgaagaatgtccctacccaaagcatcttgacctaatcagcttacagtttgaaaacctagctctccagaacatgagatgagccagccgagccagactgtgaccaggaaacagctcatcccagagaaggagatg

SEQ ID NO: 36167 - DNA, 482 bp, Homo sapiens
  misc_feature (1)...(482): n = A,T,C or G
cggacgcgtgggctgagcagttagtagtgtacaggaagttcacggtttcactgnggaagtcatccccatttgcactgctaataggaagcaaattcttggacagcttttgaggagggaatctaaaccccaggctcccaaattaggccagagatcctggaagggctttctcaaattatccccttatattcttcacagtttaaggtcaaccaactatggacttaaaatcaaagatcacaaaatgcacgagggaagaaaccactgtaagtgaaaaatacaaactagattgacctcctagggactttagttattaaaattaccataaaggacaatatttgaaaggtttaaggaaataaaggatgaaaaaaatcaagaagagactgtctagagtagccagagagtgcttcctttgtgttgtatctgaacaatgtcctaaagccattangcaacactagtggtatagcanggctgggagaggtggcgag

SEQ ID NO: 36168 - DNA, 484 bp, Homo sapiens
  misc_feature (1)...(484): n = A,T,C or G
atttggtggcatggttggctaacagcatggcggggggtgttcagcttgagacccatgcctgtgttcatttcccatggagctggcagcctggtctaccccaagtgcatgccccgcctctcctctctcccttgggtctgcctgcgtgcatgcttctccagttgcgtctgcgaagctacctactttcttgggagggtcgaccttgatcatgaaacaataccatgagggggcctctgtcacctttgaaaagaacactttttgagcagcctcaaaaagctcatacataccagcgccttcttaaattggctctaatgtaaagattgttaatgtcatttatcaaaaccataggtgattatttggagggatttaaaaaacttaattactctcaggcctcatcccaagcttgacacatgctctgtaggttgaacacataatcacaaatattctaacaaatgctgccttggttgcagcctgcactgtagacccn

SEQ ID NO: 36169 - DNA, 405 bp, Homo sapiens
tccacgcgtgcgcacggagcctacccgattatatcagaggtaagttaggaacgaacatgttagtcaatccgggtgaagacatgtactgatgacacaccatggatttcagaggaggaagtacggagtcgttgcataatccgcccctggtgggtggcactctcaggtgctcctgaacagaagatttggccctcattttccctcagaaccccacggcaaggatatatgtccccttgttctctctgcttctgtcttgaggatatggcatggcctatagaaacgcaagcagactggattgggatagaagtatttgtgtacctggattaatgaactatgattttttttttttttttttaaaccaaattttgctttgtggcccaggttgaagggcaggggcacaacttaaag

SEQ ID NO: 36170 - DNA, 409 bp, Homo sapiens
  misc_feature (1)...(409): n = A,T,C or G
cccacgcgtacgcgactgctccgggccgccgatgtattgtgggatcgcggagccgtccctgagacgctgggatccgcagaggagcccacttgagagcgcctcctgtcgtctgtaaggttgccttgccatccctcggcaccccaacttcccccgcccccccatcgcctcctcctccatcctccagttcaaaatggcgacggcggcggcagcggcggcggtgatggctcctccgggctgcccgggttcgtgccccaacttcgccgtagtctgctccttcttggagcgctacgggccgctgctagacctgcctgagttgccgttccctgagctggagcgggtgctgcaggcgccgccgccggacgtcggcaacggagaagtaccaaaagaattggtggagctccatttgaan

SEQ ID NO: 36171 - DNA, 359 bp, Homo sapiens
gctgctgagaatattcctgagaatcccctgaagtatctgtatccaaatattgacaaagaccatgcctttggaaagtattactccaggccaaaggaagcaccagagccaatggaacttgatggccctaaaggaactggatatatcaagactgagttgatttctgtgtctgaagtgtaagtgaacacagaagagtgacatgtttacaaacctcaagccagccttgctcctggctggggcctgttgaagatgcttgtattttacttttccattgtaattgctatcgccatcacagctgaacttgttgagatccccgtgttactgcctatcagcattttactactttaaaaaaaaaaaaaagg

SEQ ID NO: 36172 - DNA, 432 bp, Homo sapiens
  misc_feature (1)...(432): n = A,T,C or G
agcggagcgcggcggcaagatggcagtgcaaatatccaagaagaggaagtttgtcgctgatggcatcttcaaagctgaactgaatgagtttcttactcgggagctggctgaagatggctactctggagttgaggtgcgagttacaccaaccaggacagaaatcattatcttagccaccagaacacagaatgttcttggtgagaagggccggcggattcgggaactgactgctgtagttcagaagaggtttggctttccagagggcagtgtagagctttatgctgaaaaggtggccactagaggtctgtgtgccattgcccaggcagagtctctgcgttacaaactcctaagagggcttgctgtgcggagggcctgctatggtgtgctgcggttcatcatggagagtggngccaaaagcttgcaaggtgttgg

SEQ ID NO: 36173 - DNA, 474 bp, Homo sapiens
agacaacttgatagccacagccctttgtctttctggcagcgggtctcagtctgatttgaaggatgtggccagcacagcaggagaggagggggacacaagccttcgggagagcctccatccagtcactcggtctcttaaggcagggtgccatactaagcagcttgcctccaggaattgctctgaagagaaatccccacaaacctccatcctaaaggaaggtaacagggacacaagcttggatttccgacctgtagtgtctccagcaaatggggttgaaggagtccgagtggatcaggatgatgatcaagatagctcttccctgaagctttctcagaacattgctgtacagactgactttaagacagctgattcagaggtaaacacagatcaagatattgaaaagaatttggataaaatgatgacagagagaaccctgttgaaagagcgttaccaggaggtccttgacaaacagag

SEQ ID NO: 36174 - DNA, 404 bp, Homo sapiens
cccacgcgtccgatgaatatcaagcagatctcctttagtgatatcaatcaagtcctcgcacatcagctgggaagtgtgttccagcctacttattctgcagaaagctcatttcactacagacgaaatccactagagggatttaaagatccagctctgtatacttcctggttgaagcctgttaatgctttcaacgtgtggaaaacccagcgggcctttagcaaatatgagaagtctgcagtgttggtcagcaacagccagttcttagtaaaaccacttgatatgattgttgggaaggcatggaatatgtttgcttcaaaagcctacattcatcagtacacaaaatttggaatcgaagaagaggactttttagacagtttcacgtcattagagcaggttgttgccag

SEQ ID NO: 36175 - DNA, 399 bp, Homo sapiens
cgggggtctcctcagtatcatcccttcatggttcgccaggaagatgttactagaaaggggtccggatccagaccccaagagagggttcttggagcttgcacaagaaagattttgaggtgaatccataaagtgaaagcaagtttattaagaaagtaaagaaataaaagaatggctactccatagcggaacagccagagctccattgtatgttgtttcctctgtcttgctgcatttaaaggattctttctgtattgtttacctttgggagtatgattattaaatgtcttgaggtagtcttcattaggataaatctgcttggtgttctataactttcttgtacttggatattggtatctttctccaagtttggggacttttctgttattatcactttgaata

SEQ ID NO: 36176 - DNA, 398 bp, Homo sapiens
  misc_feature (1)...(398): n = A,T,C or G
ccccgaaccgtcctcctgctgctatcggcggccctggccctgaccgagacctgtgccggctcccaatacatgaggtatttcgacaccgccatgtcccggcccggccgctgggagccccgcttcatctcaatgggctacgtggacgacacgcaattggtgaggttcgacagcgacgccgcgagtccgaaagaggagccgcgggcgccgtggatagagcaggaggggccggagtattgggaccggaacacacagatcttctagaccaacacacagactgaccgagagagcctgcggaacctgcgcggctactacaaccagagcgaggccgggtctcacaccctccagagcatgtacgggtgcgacgtggggccggacaggcgcctgctccgtggacatan

SEQ ID NO: 36177 - DNA, 404 bp, Homo sapiens
  misc_feature (1)...(404): n = A,T,C or G
acgcccacgcgtncgggggaaaggggagagagaagcagtagatacactccttatcctccccaaattttaagctctatttctgtgccctagtcctagacacacattagactcagggagttttgtctgaagaccaggtcccactgccccctggctgaagagtctgctttaaatgggaaaacaacgtaggagcaggggtttttaggcactttcagtattctcaggtgttcttcgttctggcccttccagggtaattaggaaggcagaacaagacagatgagctcctgcctgctctgagacaagaagggtggggtctcattagctttgcaacaggaaacatcctgttttatggtagtggggtcaggaatgtaggaactggtatccattctgccaattccaccacccat

SEQ ID NO: 36178 - DNA, 421 bp, Homo sapiens
caatgccaccagggccccccggagctcgtcccaggagcaggagccgagtgccccaccagaggcccatggccccgtctgctgctgaggcccccccacacacctacatgcagggacggtgcccagtttgggggatcaaggctgagccattcttgtgctggagtgtgcaccgtgggagcaatgtggcccaggtggactcaggagggaacctggccccaaggctgcggccacttcagaggcactggctgagacggccctgaaatgtgaagctccgcggacactcccacacgtgtccccgtctgcgaggagtcccggggtgtggggcatggagtggggctgcacctcccagaggcccctcccacccttccctttccctctcccttctgcctttccaggactagaaccgggaacctggagccctccg

SEQ ID NO: 36179 - DNA, 420 bp, Homo sapiens
ctgagccaccagccccagcccaagaggtaacttccctcccctcaggctcacaggcttcagagaaggagtagacacttaaatgggaattgaggagaaagagctgttgggaagcaaccacctcctcccacctcatccacctaacaagctatatgaatctatttgattgaacctcagcttgtctttttttcctgcaaatcgtctttgtcccacctcacactctgtatttgcattgccaagtattctagtgcagacccgtaggctctcttgtacatttgaataattccttgtctacttattttttgtttactattgagttcagctcattctaacccatagcatagtgaagagtgcagacttcagtttcagccaaactgagttatatctcatcgccactactgaccagatatgtgattttgggca

SEQ ID NO: 36180 - DNA, 461 bp, Homo sapiens
  misc_feature (1)...(461): n = A,T,C or G
ccccaatgatacccactgatagtcgtcgcgaaanccccgggncgacccacgcgtccgcggacgcgtgggacactctatatagagctatgtgagtactaatcacattgaataatagttataaaattattgtatagacatctgcttcttaaacagattgtgagttctttgagaaacagcggggattttacttatctgtgtattcacagagcttagcacagtgcctggtaatgagcaagcatacttgccattacttttccttcccactctctccaacatcacattcactttaaatttttctgtatatagaaaggaaaactagcctgggcaacatgatgaaaccccatctccactgcaaaaaaaaaaaaaagggggggcggtttaaaaggatccttgggggggccaagtttaacgggggcgggcaaggaaaaatcttttcccttatgggggggggaataaaaacc

SEQ ID NO: 36181 - DNA, 396 bp, Homo sapiens
cggacgcgtgggacactctatatagagctatgtgagtactaatcacattgaataatagttataaaattattgtatagacatctgcttcttaaacagattgtgagttctttgagaaacagcgtggattttacttatctgtgtattcacagagcttagcacagtgcctggtaatgagcaagcatacttgccattacttttccttcccactctctccaacatcacattcactttaaatttttctgtatatagaaaggaaaactagcctgggcaacatgatgaaaccccatctccactgcaaaaaaaaaaaaaagggggggccgttttaaagaacccttgggggggccaaattttacgcgggcttgcaaggaaatatttttttccttatagggagccgag

SEQ ID NO: 36182 - DNA, 399 bp, Homo sapiens
tcgcggacgcgtgggtgaagaagttgcaaagaatactcattgcagcagccttcctcattatcagaaattaaagaaatttctgaataaattggcagaagaacgcagacagaagaaggaaacttaagatgtgcaaggagatttaatgatttcaaagaaaataatgggtctttgtttttaatgttaaccttttttaaatacaatactgatagttagaagaaaactattgtactcttttgttttagtggagaaataatagatgtctgttcatgtgttaagtgttatagcaaaaaaaaatacacatatggttaagttaatgaatagtttttgttttatcagaatggcaacagacagaagtactttgtagagattgacttcctaagctacttaagacaacttgcg

SEQ ID NO: 36183 - DNA, 449 bp, Homo sapiens
caacacacagcaacatccagaaataaagatctcaggaccccccagcaagtcgttttgtgtctccttggactgagttaagttacaagcctttcttatacctgtctttgacaaagaagacgggattgtctttacataaaaccagcctgctcctggagcttccctggactcaacttcctaaaggcatgtgaggaaggggtagattccacaatctaatccgggtgccatcagagtagagggagtagagaatggatgttgggtaggccatcaataaggtccattctgcgcagtatctcaactgccgttcaacaatcgcaagaggaaggtggagcaggtttcttcatcttacagttgagaaaacagagactcagaagggcttcttagttcatgtttcccttagcgcctcagtgattttttcatggtggcttaggccaaaagaaatatctaaccat

SEQ ID NO: 36184 - DNA, 420 bp, Homo sapiens
atcttgtataatgtttactaaaagagcctccccataaatcagagaggcaaaaaggtagcatataaaaagaagaaccaaaagaagagaaaacctgacttctagatgactgtggtgtcatctaaaaggcagaggtgcctgaccctcaggaatgtgtatgatgcaacagagctgaagaatgggttcccttcacctactgctggccattgtcccttctgttggagattcctttctttatggttgctgttcataaccccttcaaaatcctcaactgtgaccggcaggacggaagcgctgaggcggtggggcccacagccatggcggagcctgtgcaggaggagctctcggtcctggccgcgattttctgcaggccccacgagtgggaggtgctgagccgctcaggtttctggcatttgaagtcaa

SEQ ID NO: 36185 - DNA, 473 bp, Homo sapiens
  misc_feature (1)...(473): n = A,T,C or G
ggggacgannataccgggcttactaagagaccataagaanggcncganaatgcgtgcgccacgcgtgcgcttgagatgttttaatgttcttctatgaacatttataaggaggaattaagtactgaaggctgtgtttcagatagagtaaccgaccggccactcatgtaaaagtgaactactgcattgtggatgcagagaggctaacattgagaggcagtagtcatcctgacaggaaatggggaaggtgagcactaagataaagataagtatcatgaacagaaagaattaaatttttgtaacagaattgttagaactggtgagatataatgatgagggaaggagaggagtctaacatgatcttgaggactctactcttggaggcttaaaggaatgtgttgtctgtaattgtcacagggaatcaggaaggaagagccagttagggtcaagcgttagaatatgttaagcttaatagg

SEQ ID NO: 36186 - DNA, 412 bp, Homo sapiens
  misc_feature (1)...(412): n = A,T,C or G
agactttgatgaacgttcagaagctccccgtaggccctgtcgtaagggcctgcggaatgataaagataagccattgcctcctctgttggcccgtgttggtgggaatattgaagcacttggttttaatgctcgtcagcgaaaagcctttcttaatgcaattatgcgatatggtatgccacctcaggatgcttttactacccagtggcttgtaagagacctgcgaggcatatcatagaaagagttcaaggcatatgtctctcttttcatgcggcatttatgagagccgggggcagatggggctgagacctttgctgatggtgtcccccgagaaggcctgtctcgccagcatgtccttactagaattggtgtatgtctttgattcgcaagaaggttcaggagtttgcacatgttn

SEQ ID NO: 36187 - DNA, 402 bp, Homo sapiens
  misc_feature (1)...(402): n = A,T,C or G
gcaaatgcaggccacgccagagtgcttcgcccacctcacacatctgctgcaggtgctggccggcggacgggtctgtgccgtgctggagggcggctaccacctggagtcactggcggagtcagtgtgcatgacagtacagacgctgctgggtgacccggccccacccctgtcagggccaatggcgccatgtcagagtgccctacagtccatccagagtgcccgtgctgcccaggccccgcactggaagagcctccagcagcaagatgtgaccgctgtgccgatgagccccagcagccactccccaaaggggaggcctccacctctgctgcctgggggtccagtgtgtaaggcagctgcatctgcaccgagctccctcctggaccagccgtgcctcttgcccgn

SEQ ID NO: 36188 - DNA, 417 bp, Homo sapiens
atacgactggcttttggccaaaatctgggtgcgttccagtgacttccacgtccaccagaccatcacccaccttctgcgaacacatctggtgtctgaggtttttggcattgcaatgtaccgccagctgcctgctgtgcaccccattttcaagctgctggtggcacacgtgagattcaccattgcaatcaacaccaaggcccgtgagcagctcatctgcgagtgtggcctctttgacaaggccaacgccacagggggcggtgggcacgtgcagatggtgcagagggccatgaaggacctgacctatgcctccctgtgctttcccgaggccatcaaggcccggggcatggagagcaaagaagacatcccctactacttctaccgggacgacgggctcctggtgtgggaagccatcatgac

SEQ ID NO: 36189 - DNA, 397 bp, Homo sapiens
  misc_feature (1)...(397): n = A,T,C or G
accggcgccagtgctaccccacctcgtggcagcgctgggccttctacctcctgcccggcgtctctatggcctctgtgggcatcgccatctacacctccatgatgactagcgacaactactactacacccacagcatctggcacatcctgctggccgggagcgcagccttgctgctgccgccacctgaccagcccgccgagccctgggcctgctcgcagaaattcccctgccactatcagatctgcaagaacgatcgggaggaactgtacgcagtgacgtgacactggcctggggacagctgctgctctgatgacctcttcagccaggagctgtatcgagggggaggcgcctggtccagccctggacagattgatttccagctgaataaattggcctn

SEQ ID NO: 36190 - DNA, 426 bp, Homo sapiens
gaaattattattttatggtgtatcttagttattttctgggaatcttgttttgcctgaggacattcttgaagttgagtttataaaggactggccacaaagtctgtcatggagtttttcatcttcagtgggctgtagcagagattattcttttatgaagagtttaaggagtgagaagactcatcttccctatcgtagttctttgtttgtaaatacggtgtcattgctcttcctcatgcagctgtcactgggcacagctgtgggtgtgcatgtgtcacggagctcagcacgcacagagcaggagatgacggtgactcctggctccacagggtcgatcctgggctgccttcagtttgctgctttggccatctagttccttgcaagtattcctaaaaatacagacattttttcccattttaaaaataatgg

SEQ ID NO: 36191 - DNA, 421 bp, Homo sapiens
cggacgcgtggggaaagcctttcacgtttagtgtagaaaaaatttagataattttggtattttaaaaatctaatcttccccatttagcgccgttacttatgtgttaatacatattttgagatctatgtatttgtgacctgatatattttgtttaagtatattacgtactaaaaagtcatctacaatactttttttttttttttgaaaagggatttttgtttttgcccctcgggggggggggcttggggaattttggccccattgaacctttcccctcggggttaaaagaaattctccggcctaaccctcctaaatagggggaataacgggccctgcccccccctccaagttatttttttgtttttttaatagggaggggtttttattgtgggcaaggttgtttttaacctcctaacctaag

SEQ ID NO: 36192 - DNA, 421 bp, Homo sapiens
  misc_feature (1)...(421): n = A,T,C or G
ctcagatggccagtttgccctctcaggctcctgggatggaaccctgcgcctctgggatctcacaacgggcaccaccacgaggcgatttgtgggccataccaaggatgtgctgagtgtggccttctcctctgacaaccggcagattgtctctggatctcgagataaaaccatcaagctatggaataccctgggtgtgtgcaaatacactgtccaggatgagagccactcagagtgggtgtcttgtgtccgcttctcgcccaacagcagcaaccctatcatacgcctcctgtggctgggacaagctggtcaaggtatggaacctggctaactgcaagctgaagaccaaccacattggccacacaggctatctgaacacggtgactgtctctccagatggatccctctgcgcttctggaggcan

SEQ ID NO: 36193 - DNA, 459 bp, Homo sapiens
  misc_feature (1)...(459): n = A,T,C or G
ctctcccgaaactaaacttgagcctccattatggcatgctgaatttaccaaagaagaattggttcagaagctcagttccaccacaaaaagtgcagatcacttaaacggcctgcttcgggaaacagaagcaaccaatgcaattcttatggagcaaattaagcttctcaaaagtgaaataagaagattggaaaggaatcaagagcgagagaagtctgcagctaacctggaatacttgaagaacgtcttgctgcagttcattttcttgaaaccaggtagtgaaagagagagacttcttcctgttataaatacgatgttgcagctcagccctgaagaaaagggaaaacttgctgcggttgctcaaggtgaggaagaaaatgcttcccgttcttctggatgggcatcctatcttcatagttggtctggacttcgataggttgatggaaggaatatttttattan

SEQ ID NO: 36194 - DNA, 396 bp, Homo sapiens
  misc_feature (1)...(396): n = A,T,C or G
gccagccgtcaccatgaagaaattctttcaggagttcaaggccgacatcaagttcaagagcgcgggacccggtcagaagctcaaagagtccgtgggggaaaagacccacaaagagaagcccaaccagccagcccccaggccgccccgccagggacccaccaatgaggcacagatggcagccgctgccgccctagcccggctggagcagaagcagtcccgggcctggggccccacatcgcaggacaccatccgaaaccaggtgagaaaggaacttcaagccgaagccaccgtcagcgggagccccgaggccccagggaccaacgtggtatctgagcccagagaggaaggctctgcccacctggctgtgcctggcgtgtacttcacctgtccgctcan

SEQ ID NO: 36195 - DNA, 389 bp, Homo sapiens
ccaaggccatcccgcgtgggactcagagttacagctttccctctcacacccgggaccacctgagagggtgcccacggcagccccccacccatcgagggggctggtccggctgctccgccagctgtccttctgcgcacacagtgggcacctactgcacgcatggcactgtgcttacagctggagtgagccgcaagcacacctgctgttgaaggtgcccgcccgacggggccgccctgagcatgggtgtgcagacgtatcctcgagaccctgttcagcgttttgggtgtacgcccaggagacgaattgctggatgctgtggcaattctatgtttacttgtttgaggagcttccatggtagctgcaccatttcacattcccgccaacagtgc

SEQ ID NO: 36196 - DNA, 395 bp, Homo sapiens
ctggtgccttcccggaagggctcagaggcgggctcgggcaagcactttaaccttttaagcccaaccagatgagttgcctgcagttttggaggccttcagagcatttcactagacctctgtctgtgtcggtccagtgtctttagccaagctttgattaaagatgacttccttgtttgctcaagaaattcgcctttctaaaagacatgaagaaatagtatcacaaagattaatgttacttcaacaaatggagaataaattgggtgatcaacacacagaaaaggcatctcaactccaaactgttgagactgcttttaaaaggaaccttagtcttttaaaggatatagaagcagcagaaaagtcactacagaccaggattcacccacttccacggcctg

SEQ ID NO: 36197 - DNA, 380 bp, Homo sapiens
actgtgtttatctccctttaaaaccctacctatcctgaatggtctgtcattgtctgcctttaaaatccttcctctttcttcctcctctattctctaaataatgatggggctaagttatacccaaagctcactttacaaaatatttcctcagtactttgcagaaaacaccaaacaaaaatgccattttaaaaaaggtgtattttttcttttagaatgtaagctcctcaagagcagggacaatgttttctgtatgttctattgtgcctagtacactgtaaatgctcaataaatattgatgatgggaggcagtgagtcttgatgataagggtgagaaactgaaatcccaaaaaaaattttaaaaaagaaaacccctcaaaagc

SEQ ID NO: 36198 - DNA, 430 bp, Homo sapiens
ccaggctggccgtgaactcctgtgctcaggtgatcctcccacctcagcctcccaaagtattgggattacaggagtaagccaccgcacctgacctagatgtcattttaaatcagtcttatttttccatttacagagctgtgcatgtgggttattaaaattcaaacagtgcagaggcaaagcatacacatctcgatttggtcccaattcttcatatttgtatttatcccaggggccagatagtaaatattttagcagttgctggctggctctgttatctgttgcgatgattcagtcccgccaccataggacaggagcagccctgagtgatatgtaaatgaagaggcgtggctttttggggttaaccaggtggcaggtggatttagccaggaaaagggtggtttgctcacccctggtctatgttaattgatat

SEQ ID NO: 36199 - DNA, 423 bp, Homo sapiens
  misc_feature (1)...(423): n = A,T,C or G
aggctttttcccccgtcgctggctctgcccgaagtttctagagttttctgaccttcaaggcgagaactgctgtgtcattcttagggacactccccaacaaactgcgccacccgagtctctccctcctctcgccagccggccctaaaacatcaaggttagtcaggactctatatttaacgtccggaagattctgtgaactatatgccaaccttgccctagtaacggggctcccccctcctttcccctctttctgcttgagcaatctgttctatcggaaaggagaggcagggctgggagagctggaaggtggggaaggcaagagcttgtaggggccatggtcttgagtccgaagagcacagcagcagccaggacgggagtccctggctgatcacataccncgggtgcccttaatgctcgcagagg

SEQ ID NO: 36200 - DNA, 413 bp, Homo sapiens
cccacgcgtgcgcggaggcagccttaccagacagatggagaaggatgaaactgtgagtgactgctccccacacatagccaacatcgggcgcctggtagaggacatggaaaataaaatcagaagtacgctgaacgagatctactttggaaaaacaaaggatatcgtcaatgggctgaggtctgtgcagacttttgcagacaaatcaaaacaagaagctctgaagaatgacctggtggaggctttgaagagaaagcagcaatgctaaacctctgtttcatgctaaccagacacgccgtgcactcgttagattcctttcttagaaaactcgttttctgctcccttccctcgtcccttccctccccgacaggtcacataacagctgcatcattgaccgcacagcgccatctctccct

SEQ ID NO: 36201 - DNA, 307 bp, Homo sapiens
aaatcacgtgtccatcgagcacgtctgaaacccctggtagccccgacttctttttaattaaaataaggtaagcccttcaatttgtttcttcaatatttctttcatttgtagggatatttgtttttcatatcagactaataaaaagaaattagaaaccaaaaaaaaaaaaaaaggggcggccgtttaaaaggacccctggggggcccaaattttacccggccttgcaacgaaatacttttctccttatagggaggggaataataacctccctgggaattttggaaaagaacccttctttttggggggg

SEQ ID NO: 36202 - DNA, 467 bp, Homo sapiens
  misc_feature (1)...(467): n = A,T,C or G
attaacttctacagttaacctacaagagccatggaagagtgggaaaatgacacctccattatgcaagtgtggtcggagatctaagagacttgttgtttctaataatggacctaaccatggaaaagtcttctattgttgccctatcgggaaataccaagaaaacagaaaatgttgtggttatttcaaatgggaacaaacacttcaaaaggaaagagccaacagcatggttccatctcattccacagggggactcacttttagttctccagaaacaagccatatttgtgacagaaatttaagtatttccaccaaaaattctttgagactcaggccttcaatgaggaattgataacctttcatgtatgaatcctaattgttccttgaatttccaaacatgagtattctgataacatcttacactattttatttttattttatatattaatgcttactgcatttaccatan

SEQ ID NO: 36203 - DNA, 421 bp, Homo sapiens
gagtacagagcgagaatccgtacatgcttgtctccaagagagctcctggcccctggggctgcccagccaggggctcaacagtccagaccgatggacacgagcaggtcctcgagtgcccgcagacgctgctgcgcctcctctatggcgctgtaggtctgcaccgtgctggccacgtggaagcggatgtcgtccaccagcgggatagagtccgtctcctgccgggctgccacagccgctgcctcctccttcaccgcctccacgaagtcctcccgctccaccagcttctcaatgaccttggccatgtactcagtgcactggtcctcaagccgcgccaggcggaagagcttggccacgcgccacacacccaccacagtgtcctcgtctagcatctgagccaggctgcggccgctctagaggatcc

SEQ ID NO: 36204 - DNA, 407 bp, Homo sapiens
cgccaacatgggccgcgttcgcaccaaaaccgtgaagaaggcggcccgggtcatcatagaaaagtactacacgcgcctgggcaacgacttccacacgaacaagcgcgtgtgcgaggagatcgccattatccccagcaaagctccgcaacaagatagcaggttatgtcacgcatctgatgaagcgaattcagagaggcccagtaagaggtatctccatcaagctgcaggaggaggagagagaaaggagagacaattatgttcctgaggtctcagccttggatcaggagattattgaagtagatcctgacactaaggaaatgctgaagcttttggacttcggcagtctgtccaaccttcaggtcactcagcctacagttgggatgaatttcaaaacgcctcggggacct

SEQ ID NO: 36205 - DNA, 473 bp, Homo sapiens
  misc_feature (1)...(473): n = A,T,C or G
cccacgcgtncggcggcatcaaactcaacggggactgctcccctatctccaccccggagctgctcactccgtgcggctcggcggagtacatggccccggaggtagtggaggccttcagcgaggaggctagcatctacgacaagcgctgcgacctgtggagcctgggcgtcatcttgtatatcctactcagcggctacccgcccttcgtgggccgctgtggcagcgactgcggctgggaccgcggcgaggcctgccctgcctgccagaacatgctgtttgagagcatccaggagggcaagtacgagttccccgacaaggactgggcccacatctcctgcgctgacaaagacctcatctccaagctgctggtccgtgacgccaagcagaggctgagtgccgcccaagtcctgcagcacccctgggttcaggagtgcgccccggagaacaccttgcccactcccatgggtctgcag

SEQ ID NO: 36206 - DNA, 425 bp, Homo sapiens
ttcaaggctctgtgacaatatactcttgagaagacaattctgccttcctatatgcaaggataatcagcaactgaaaatctaaaaatagtaatctccagttaagctataattaaatgcttcattttaccttcttattttattcaaatcatgctgtaagtgcacttaaccgtatgcagatgcaaagtgactcatatacaaatctgttatggtcttcccaatatttctgacacttagtaatggcccttgggaaatttctagaagaaaacactcttataaaacgatgcttaacagctgtgctctgtctccagagaacagaaaaaggaagtgaatctaaaacccaatggaagcaagtacagagccactgcgcccagctaggaaaagcctttttaaaactctattattaccaatattctcagagagatgag

SEQ ID NO: 36207 - DNA, 420 bp, Homo sapiens
caaagaattggatgaaatgcacaaagcaaggaaggaatgaagggatttatagaaaatgaaagtgcactctacagtgtagaagcaggcctgagaataggggctcaaaggccctattacagagtttttgtgagtttaaatatcctctacttggggtatgccctatgtaaatgaagaggatgaagatgaagtaaagttacaaagtcatttacagcatatgccctatggagaggatatttcctgttatagctgaagtgtgaatcggccttatgtttcctgcctccagaccctattttcctgcctcattgccatatgactgcattattctgctactgtgtaagtgattttctaaacccaaggcagtctttgacattgagaagctgggaaaagtctggtggtgaggattccacaggggaaatcctt

SEQ ID NO: 36208 - DNA, 406 bp, Homo sapiens
cgcgtttgcacctcgctgctccagcctctggggcgcattccaaccttccagcctgcgacctgcggagaaaaaaaaagtacttattttcttgccccatacataccttgaggcgagcaaaaaaattaaattttaaccatgagggaaatcgtgcacatccaggctggtcagtgtggcaaccagatcggtgccaagttctgggaggtgatcagtgatgaacatggcatcgaccccaccggcacctaccacggggacagcgacctgcagctggaccgcatctctgtgtactacaatgaagccacaggtggcaaatatgttcctcgtgccatcctggtggatctagaacctgggaccatggactctgttcgctcaggtccttttggccagatctttagaccagacaactttg

SEQ ID NO: 36209 - DNA, 410 bp, Homo sapiens
aaggagctcggtcctttcgaggaagctaatgctgcgttggggtgaggccctcacttcatccggcgactagcaccgcgtccggcagcgccagccctacactcgcccgcgccatggcctctgtctccgagctcgcctgcatctactcggccctcattctgcacgacgatgaggtgacagtcacggaggataagatcaatgccctcattaaagcagccggtgtaaatgttgagcctttttggcctggcttgtttgcaaaggccctggccaacgtcaacattgggagcctcatctgcaatgtaggggccggtggacctgctccagcagctggtgctgcaccagcaggaggtcctgccccctccactgctgctgctccagctgaggagaagaaagtggaagcaaaaaagaagaat

SEQ ID NO: 36210 - DNA, 405 bp, Homo sapiens
tgaagtctaggtatagtagatgctcatcattcgcagattctatatttgcaaattcgtctactcactaaaatctatttgtaatccccaaatcaattttcatggcacttttgtggtcattgagacacacgcagagttgtaaaaattttgagtcgctggatgtgcacgtgcccagccgaggcaaacaaagtgacacagactctgccttcttatttcagctctcatattgaaaaaaatttcggccatgcacagtggctcatgcctgtagtcccagcactttgggaggccggggcaggaggatcccttgagctcaggggtttgagaccagcctgggcaacacagcaaaaccccatctctacaaaaaatacaaaaattagccaggcatgattgcacaggtctgtagtcccg

SEQ ID NO: 36211 - DNA, 411 bp, Homo sapiens
  misc_feature (1)...(411): n = A,T,C or G
cggacgcgtgggtgtctcttgaattagacattccaattgtgataggtagagtcatgttaaaacaatagaatagcaactgccatattggtagtttcactgctcaatatgatttctaataagagcagagctttattggaagctaaaactcatttttctccatagatgattctaacagtttaataaaaaagtataattatactttaagtgtcaacagattttgagtctagaagcaaatttcattttccttgtgttatatctaatatccattgacatgggtaagaaaactaattatgtctttttagtatgatgaaatgtgggcccagagtattggaaagaaagcaatagccctattcagtgtccactaggatggatattgcaaaaagcatgagtttgtcctttattcccccttan

SEQ ID NO: 36212 - DNA, 404 bp, Homo sapiens
ccatggttatgttggctgccctggctcaccatttgttttactgggatgtttggtttatatataatgtgtgtttagctaaggtaaaaggctacaggtctctttccacatcccaaactttctatgatgcttacatttcttatgacaccaaagatgcctctgttactgactgggtgataaatgagctgcgctaccaccttgaagagagccgagacaaaaacgttctcctttgtctagaggagagggattgggacccgggattggccatcatcgacaacctcatgcagagcatcaaccaaagcaagaaaacagtatttgttttaaccaaaaaatatgcaaaaagctggaactttaaaacagctttttacttggctttgcagaggctaatggatgagaacatggatgtg

SEQ ID NO: 36213 - DNA, 410 bp, Homo sapiens
ctattgtctgaatgcaccacagtttatgcactcacctactgaaggatatcttggttgcttacaaggtttggaaattatgagtaaagctgctacaaacatctgtgcgcaggttttttgtggatagacgttttcaacttatttacgtaacgaccaaagagcacaattgctggatcatatgccaggagtcttctgagaaactaccaacctgtcttccagagtgactgtaccattttgtattcaaacgagcagtgaatgagagttcctgctgctctgcatctccgtcagcatttgatgttgtcagtgttctggattttggccatcttaatagctgtacagtgggatcttgtcattgctttaatttgcatttctttgatgaagtatgatgtggagcatcttttcatgggcttatt

SEQ ID NO: 36214 - DNA, 401 bp, Homo sapiens
  misc_feature (1)...(401): n = A,T,C or G
cggacgcgtggggggaagaggagagagaaagagcaactgaggaaaaagaatcaaatgatttattattaatccggaagaatagaatggcactttttcaacatttgacttgtgtaattccaatcctggatagtctactaactgccggaattattaatgaacaagaacatgatgttattaaacagaagacacagacgtctttacaagcaagagaactgattgatacgattttagtaaaaggaaatattgcagccactgcattcacaaactctctgcaagaagctgaagctgtgttatatgagcatttatttgtgcaacaggacataaaatatattcccacagaagatgtttcagatctaccagcggaagaacaattgcggagactacaagaagaaagaacatgn

SEQ ID NO: 36215 - DNA, 417 bp, Homo sapiens
acaggcagatcacctggggtcatgagttcgagaccagcctgaccaacatggacaggttaaaaatacaaaattagctgggcatggtggcacatgcctgtaatcccagctactcaggagtgtgaggcaggagaattgcttgaacccacgaggtggaggttgcggtgagctgaaatcgcgccattgcactccagcctgggcaacaagagcaaaactctgtctcaaaaaaaaaaaaaaaaaaaggtttaagggttgaaaggcttttcctcacggttaactttttttatttgggcggaccccccatcattttttgttaacggaacactgaacctttccctccttattttaggcggtaaacctacctccggggggcattggagtgggaaccctttaatacccatagtggagggcctttgccta

SEQ ID NO: 36216 - DNA, 231 bp, Homo sapiens
aggggtctgtgtgtgtgcatgcttttcatatctgggtcttgtcgtggttatgggcctacatatccatgtcctttcattagtgttagaaaattcctattcaatatgtcttttaatatttacttctgccccattacctcctctccttcagtaaacttaattttaggaatgttagatattttgagtttttttctataggtctcttacacagcgttctgtttcttaatctcgcga

SEQ ID NO: 36217 - DNA, 402 bp, Homo sapiens
ctcggctcaggtcagtctagatgatgaggaaccgtggccaagcttaccctggcggggtacgaggctcatctcttccttttaagcagcaggctatcagagacctcggaagagcctgcacagatcattccttgtgcttctagacggagaggggccactgtagtacaggaactggccatcactcttgcaatacctgctgcctgtctgcgtgaccgatgatcagtaagtgaagcaccttgctacatgagcagttggtccatgaggaaaagatgctctcccacctaaggccaggaatctgagagcaggactggctgagctcccagggcaaggggttcactaatgcttatcaataaagaatattgagcctggaaaaaaaaaaaaaaaaaaaaaaaaagggggggcggg

SEQ ID NO: 36218 - DNA, 389 bp, Homo sapiens
  misc_feature (1)...(389): n = A,T,C or G
agtgtgtgtgtttttttccatataaattatctcctataatataccgcaatgttcatttttaagaaaaatgtcgagactcgaaccagagcattttaaaatccaaaatggaaaactgaattgtaactgtattatagtttttgtttcaaaatagtttaatgaacattaaacattttgaaagaatggactatgtaaaaaaaaattagagggttttgtatgttaagttttagagggtccggcagaagcatgtggctgtaagactaggtggggaccttagtgagtctggagtggagaaaggaggtttgtcttgtacctgcggtatgtgggcggggaaggttatgcaaagtgaattgacagtgttcttgggtcgggttcatcacatttaccccaan

SEQ ID NO: 36219 - DNA, 208 bp, Homo sapiens
cgaagggtgatcatcaccatctgccggctcattggcatcaaagacatgtatgccaaggtctctgggtccattaatatgctcagcctcacccagggcctcttccgtgggctctccagacaggaaacccatcaacagctggctgataagaagggcctccatgttgtggaaatccgcgaggaatgtggccctctgcccattgtggatgcgt

SEQ ID NO: 36220 - DNA, 439 bp, Homo sapiens
actcacaggagtaagaagctcagaaaagcacagtgagtcccagagctaaagaaccttctaggcaagtacaccgaatgactcagtccagagggtcagatgctgctgtgagaggcacagagccctttccgcatgtggaagagtgggaggaagcagagggagggactgggcagggactgccggccccggagtctcccacagggaggccattccccttctactcaccgacatccctcccagcaccacacaccccgcccctgaaaggagatcatcagcccccacaatttgtcagagctgaagccagcccactacccacccccactacagcattgtgcttgggtctgggttctcagtaatgtagccatttgagaaacttacttggggacaaagtctcaatccttattttaaatgaaaaaaaaaaaaaaaaaaaaaagggggggcg

SEQ ID NO: 36221 - DNA, 407 bp, Homo sapiens
tggggctgtgccatcggcaaagccaggcaagctgcaaagacggaaatagagaagcttcagatgaaagaaatgacctgccgtgatatcgttaaagaagttgcaaaaataatttacatagtacatgacgaagttaaggataaagcttttgaactagaactcagctgggttggtgaattaactaatggaagacatgaaattgttccaaaagatataagagaagaagcagagaaatatgctaaggaatctctgaaggaagaagatgaatcagatgatgataatatgtaacatttactccagcatctattgtattttaaatttctactccagtccaatgtaactatttagccctggattatacatactggccaattttcattaaatttttgtcttataactattgaaaaaaa

SEQ ID NO: 36222 - DNA, 420 bp, Homo sapiens
cccacgcgtccggcgtcggactaccgttggtttccgcaacttcctggattatcctcgccaaggactttgcaatatatttttccgccttttctggaaggatttcgctgcttcccgaaggtcttggacgagcgctctagctctgtgggaaggttttgggctctctggctcggattttgcaatttctccctggggactgccgtggagccgcatccactgtggattataattgcaacatgacgctggaagagctcgtggcgtgcgacaacgcggcgcagaagatgcagacggtgaccgccgcggtggaggagcttttggtggccgctcagcgccaggatcgcctcacagtgggggtgtacgagtcggccaagttgatgaatgtggacccagacagcgtggtcctctgcctcttggccattgacg

SEQ ID NO: 36223 - DNA, 397 bp, Homo sapiens
ggaattacataaggataatgaggcccaactgaaaccaagtttcagtctgccttacctttacccgtccttgagaacagcggtccaggagaatcaggcagtctgtggcctcctgtagcagggcgctcttaacagactcaggtgtaaggtttggatcccttgctacatcacaaatcagtttcaagagggccttcagtaagaccacaagtctgcaggaaactctggaatcaggaagaaaagctatgttcatactctaaatctggatattaaaattggaagagacttcaaagactgtcaagtggaaagctatcatttcctaaattaaggaacttaggtcaaagttaaatgaaaaagacctaaaaacagaaccaaagtcagcctctagatttcttaccctcaa

SEQ ID NO: 36224 - DNA, 395 bp, Homo sapiens
actgaatttcccaatgagtatcccaagccccagcccattttctccccatcccagctcttcctgcatatactttcaagttccaggtaacagtgtaccacagggaccacagtaagtctgtacctccctgcctttaaatctttccttagcctcttccctctgcccaaaggctcagcttttaaaacccaactcgaatatttatcctgtgctaggaaataggacacagttcaatttggtcagtttcattgtattaaccacaggttgtaacatatacaaccccaaaatttcagtagcttaaggaaataaaattatatgcattttttaaaatctctgccaaatacctccaaaacaccttttaaattcatcctaatgttaattaatcatttgctttcttgctc

SEQ ID NO: 36225 - DNA, 410 bp, Homo sapiens
  misc_feature (1)...(410): n = A,T,C or G
cccgaacccttctcctgctgctctggggggccctggccctgaccgagacctgggccggctcccactccatgaggtatttctacaccgccatgtcccggcccggccgcggggagccccgcttcatcgcagtgggctacgtggacgacacgcagttcgtgaggttcgacagcgacgccgcgagtccgagagaggagccgcgggcgccgtggatagagcaggaggggccggagtattgggaccggaacacacagatctacaaggcccaggcacagactgaccgagagagcctgcggaacctgcgcggctactacaaccagagcgaggccgggtctcacacttggcagacgatgtatggctgcgacctggggccggacgggcgcctcctccgcgggcataaccagttagcctan

SEQ ID NO: 36226 - DNA, 411 bp, Homo sapiens
  misc_feature (1)...(411): n = A,T,C or G
tttctttggcagttctatcaagttttttgttatgcattttgaaattctgttattaggtatataaactttaggattgttatgtcctcttaaaatttttcttttcaacttacataatctacagaatgttgtgtcctcttgatgttatgattcctttatcaggtgaccttttatcattcataatactatatgctatgaaattctgctttgtctgacatgaatagaactgctccatcttcaaatcatttaaaatgctaacatccaagcatctttttattgctttgtgtttgatgataacatgtagttttgttttttgttgttgttgctgctgcttttgtttgtttttttttttgagacggagtttcgctcttggcgcccagtctagagggcagtggcgctattttggctcactgn

SEQ ID NO: 36227 - DNA, 407 bp, Homo sapiens
gcgccagctttgctcattgttattagcctggtcattatggatgttctgagtttgagactcttttaccagcggatagaagaggtagggatggcccttagtcccctctttttttaggttaagactgtggtgtaaaatttataggtttcatgattagaagtgtaatttggggcaagttacactctatatgtattagttcccattttgaaatggggataaaaaaatatagggtttttgttaggattacaggagaacactaacttgtattgctcagtacataatcctttgataactattaattgttaatcagggggcctgcttttttcctgtctccctctctccgtactgacttccatttgtgtcataatttggaaatattttttggttctgtacataatttctcattacat

SEQ ID NO: 36228 - DNA, 491 bp, Homo sapiens
  misc_feature (1)...(491): n = A,T,C or G
acgtgacaattgatnactgacggacctgcgnccggaaccccgggtcgacccacgcgtccgcggacgcgtgggcggacgcgtggggggaggatgaggcaggcagatcacttgaggtcaggagttcaagactggccaacatggcgaaacccaatctctactaaagtactgggattacagaagtgagccactgcacagggcctggttctaagttttaacattagaactctgccaacattaagataaatcagaatgtatcatataaaaacctggatttctggcttctctggaagaaggaagatccggcaatagagggcctggactcgcctgtgagaaacatcgagtggggcagggtagccgtagctgccacctgcagacagagctgaagcttaccagctcaccccagtctccaccactccctcctgcttcaatcccgaggcctgccgttcattgccatttattatctgtgaatcatttcactcgtctgtgctccn

SEQ ID NO: 36229 - DNA, 397 bp, Homo sapiens
  misc_feature (1)...(397): n = A,T,C or G
agcagcctgaggtgatctgtgaaaatggttcgctattcacttgacccggagaaccccacgaaatcatgcaaatcaagaggttccaatcttcgtgttcactttaagaacactcgtgaaactgctcaggccatcaagggtatgcatatacgaaaagccacgaagtatctgaaagatgtcactttacagaaacagtgtgtaccattccgacgttacaatggtggagttggcaggtgtgcgcaggccaagcaatggggctggacacaaggtcggtggcccaaaaagagtgctgaatttttgctgcacatgcttaaaaacgcagagagtaatgctgaacttaagggtttagatgtagattctctggtcattgagcatatccaagtgaacaaagcacctaagn

SEQ ID NO: 36230 - DNA, 413 bp, Homo sapiens
  misc_feature (1)...(413): n = A,T,C or G
aattttcttctatcggcagcggcccacggccctggatggtcctcttaccaacatccggactttcaggcgctcaaaagctgggaaccatcatctcagcgccagctctaccagttctcgttttgggccagaggcagactctgcactcccacgcctgttctcctggaagggacctggatggactaacggctaacctggacctggaactgtttggccaggggattgtctcagggccgacgttccacctggggcttccctccccacccacccgcactccaggctttcccttttttgttttgttcaacattgtaagaacaaacaatgctgttattactgttcccaccatgattgatgtggggtaaatattaaggagatggcctcatgggaatttgaccttgactagaaatagagactgn

SEQ ID NO: 36231 - DNA, 423 bp, Homo sapiens
tcccattgttctaaaataggactttcatattattaaaacctcaaaagatgatccacccaggatgaacaaagatcaccaaggggaaagaaaacattttttatctttacagaaaacatgttaagattatatctagatgtattctttacattggatattgtattagagtcctccttacaagaaatgaaatagtttttagcactcttagcattagagttcctaaattggtgttgatagctacagttttaaaatgtataacctgaaaatgaaggttaattttgcattgtaagagcacatttgatctatgtaaaaagcgtccatttggtgtatttttttaaaaaagagaaagcactttcatattaagtagcatgtgtatgaatttagattttcatatttgatgtgtctgtattcagtgaagtaaattga

SEQ ID NO: 36232 - DNA, 410 bp, Homo sapiens
cgaggctcccggcgctcgctgctcccgcggcccgcgccatgccctcctacacggtcaccgtggccactggcagccagtggttcgccggcactgacgactacatctacctcagcctcgtgggctcggcgggctgcagcgagaagcacctgctggacaagcccttctacaacgacttcgagcgtggcgcggtggattcatacgacgtgactgtggacgaggaactgggcgagatccagctggtcagaatcgagaagcgcaagtactggctgaatgacgactggtacctgaagtacatcacgctgaagacgccccacggggactacatcgagttcccctgctaccgctggatcaccggcgatgtcgaggttgtcctgagggatggacgcgcaaagttggcccgagatgaccat

SEQ ID NO: 36233 - DNA, 380 bp, Homo sapiens
  misc_feature (1)...(380): n = A,T,C or G
cccacgcgtccgatctaatataagactatagtaggtgtttccacacctgttaccccatttaattcaccccaaaccctgtaaattcaatccagtgaactacactgctacagatgaggaaacaggcagggctcagagaagtgaagtaacttagatgagggtcattcatctagtaggctatgcagacactcatctcccccattgccttttcttgcccccttagacaagcagtatgctgtcttggtttagggattaaggatattaattcaagtcccagatctgtgactcatcagctgtaggtccttgtgtaagtaatttaactgtttcacacctcagtttgtccacatataaaatggggatgatgatcatatagcagctgccan

SEQ ID NO: 36234 - DNA, 561 bp, Homo sapiens
  misc_feature (1)...(561): n = A,T,C or G
tctctgtgacccgtccctcacacgatgagcgacacacgctacccgctttcttcagctgcggcncgccncgcnnccccccccttcgacccccctcgatagancgcctgcggaaccgccccggaanncccgggncgacccacgcgnccgcggacgcgtgggctgagggagattatccagcccgttatccttgagctgatcaagcagcagcgcctgaaccggctctgtgagggcagcagcttccgaaagattgggaaccgccgaaggcaagaacggttctggtactgccggttggcactgaaccacaaggtccttcactatggtgacttggatgacaacccacaaggggaggtgacatttgaatccctgcaggagaaaattcctgttgcagacattaaggccattgtcactgggaaagattgtccccacatgaaagagaaaagtgctctgaaacagaacaaggaggtgttggaattggccttctccatcctgtatgaccctgatgagaccttaaacttcatcgcacctaataaatatgagtactgcatctggattgacgggccn

SEQ ID NO: 36235 - DNA, 406 bp, Homo sapiens
cccacgcgtacgaaaaaccagtgtcttcctagtatttaattaatctgcttccacagcactatagagggtgtgaggtattacagaagagatactgtatgtcagactgataccatggtgttgctttttttggttgtcctagaatgattcacagtgttaggtgagggaggtttggctgggtgtgttggctcatgcttgtaatcccagcattgtggggggctgaggctggaggatcccttgagcccaggaattgagactagcctgagcaacaagggagacccgtctctacaaaaaaaaaaaaaaaattttttttaaagagagggaaaaggcttcctccccaaggggttttcttatacccaaataggcagatcagtcttaaaggttaaatttttttggaatctgaggcttg

SEQ ID NO: 36236 - DNA, 413 bp, Homo sapiens
cggacgcgtccgcccacgcgttctatgctttcttgttaattttttcatgttaaagagctaaagtcataacatgattacagtcaactctccattatctatataaaatagtgactaagcctcaggtttttaattttgtgataacaaaataacgaaggcatgtaagacctgattctggaggaacatgaaatttgtcttttctcatgtccagagttctatcctgcccccactgtccactgtagggtcatccgcaaagccctagcagaatgtgctcactccatttccttacacgtttctagcatgggtcagaggaaacaacatttgtgttataacttcgtcttgataggctgtagtgtacatgggatgtaaaacaaacaagtgtatcaaaaggggatgattcttgtagagtgaagttg

SEQ ID NO: 36237 - DNA, 475 bp, Homo sapiens
  misc_feature (1)...(475): n = A,T,C or G
cccacgcgtncgagtaagtaaagtaagaagtgaagagaaagatgaagactctgaaagaggagatgaagatagagaaagaagataccgagaaagaaagagaagaaccaaagatgatacctggaaagcagatgacctcagaaaacatctctgggccatacagtcaggtggttccaaggaagaaagaaagcacagagagaagaagctgcgtaaggagtctgagatggaccttcctgaacataaggagccgaggtgcagggatcccgaccaggatgccaggagcagagacagggtggccgaagtccacaccgctaaggagagtcctcgtggggagagggacagagacagacagagggagaggagaagagacgcanaagaccgggagaaagatgagctgaaggagaaacatcgagaggcagaatagtctcacagcagaggagaggacagggaanaaaaaaaaaaaaaggggcggccgttt

SEQ ID NO: 36238 - DNA, 404 bp, Homo sapiens
cccacgcgtccgcccacgcgtccggcccggctttgtagagcagacagatctggtgtctccagtttacagaagcacttgcagaactcatcagaagccaccccgcttatcagcagatctcaagagagcgttcggtggaggccctgggtctgcacagctcacctccctgggaactgctcgcccgagcgtcggagccggcgctggccccctgcagccggaaggttgcagccgcaggagccccggaggcccaggacacagggctcttgctcttgcagaatccacaggtctttcttgaggaaatctgtagacagaactttgtgctgcgtttttatctagggaaggaacagaagagtgtcgtctcctagaaatctagcactggagaaacgaggaaaattcttccagcgatg

SEQ ID NO: 36239 - DNA, 407 bp, Homo sapiens
  misc_feature (1)...(407): n = A,T,C or G
cttttttaaaatattggtcaattcctgacataagatgtgaggttcacagttgtattccagtattcaagatagattcctgatttttcaattaggaaaagtaaaatccaaaatgttagcaaaacaaagtgcaatattaaatgtttgctttatagattatattctatggctgtttgtaatttctctttttttccttttttatttggggctgaatatgtccttgtaggctctgttttaagaaaacaatatgtgggaaatgatttaatttttcctattgctcttccttgtggaaaataaagtgttttgtttttttctgttttgnnnaanaaaaannanaaaaaaaaaataaaaaaaaaaaaaaaaaaaggggccgcctttttaaaaattccttggggggcccccatttttcc

SEQ ID NO: 36240 - DNA, 481 bp, Homo sapiens
  misc_feature (1)...(481): n = A,T,C or G
cccacgcgtncgcggacgcgtggggtgcaatggcgccatctcagctcactgcaacctctgccttccggattcaagcaattctccttcagccctccaagtagctggggttacaggtgcccgccaccatgcccagctagtttttgtatttttagtagagatgaggtttcaccatgttggccaggctggtcttgaactcctgacctcgtgatccccccacctcggccttccaaagtgctggattacaggcgtgagccactgtgcctggcttgcatttttaaaatactgaattattcaaaagaagtaccctgtcaatatgtgctttctaggaaaacagtaaaataggccacaatttggagtgacaccattcagatcaaggtctatccagttttttcttttcatgctaagtgcctacatcaccgaaacacactaantataaaatatcctttctccttcattttcagatgtgtgaaaaatggtactt

SEQ ID NO: 36241 - DNA, 409 bp, Homo sapiens
tgctgtaagaaaggacggaggctgttatctatggcagatctatccaataaaggagagaaaggaccgcatacgcctggttctcatcatatgcaataaagagtttgaccatctgcctccaagaaatggggctgactttgccatcatggagatgaagaagctgcttgaggatctgggttacagtgtggatgtagaagagaatctgacagccaggataacgtgtccaggagagacagcacaaggggctccatcttcatcacacaactcatcgcatgcttccagagatattcctggcgctgccacctagaggaagtattttggaaggttcagcaagcatttgaaagtccggaggcaacagtccaaatgcccaccatagaacgagtgtccatgacaagatatttctacctctttc

SEQ ID NO: 36242 - DNA, 238 bp, Homo sapiens
caatggcaacagctttgccactcgactttccaacatttttgttattggcaagggcaacaaaccatggatttctcttccccgaggaaagggtatccgcctcaccattgctgaagagagagacaaaagactggcggccaaacagagcagtgggtgaaatgggtccctgggtgacatgtcagatctttgtacgtaattaaaaatattgtggcaggattaataaaaaaaaaaaaaaaggggg

SEQ ID NO: 36243 - DNA, 416 bp, Homo sapiens
  misc_feature (1)...(416): n = A,T,C or G
tagaatacaagggagagaccaaaagcttctatccagatgaggtgtcttctatggttctgacaaagatgaaggaaattgcagaagcctaccttgggaagactgttaccaatgctgtggtcacagtgccagcttactttaatgactctcagcgtcaggctaccaaagatgctggaactattgctggtctcaatgtacttanaattattaatgagccaactgctgctgctattgcttacggcttaaacaaaaaggttggagcagaaagaaacgtgctcatctttgacctgggaggtggcacttttgatgtgtcaatcctcactattgaggatggaatctttgaggtcaagtctacagctggagacacccacttgggtggagaagattttgacaaccgaatggtcaaccattttattgct

SEQ ID NO: 36244 - DNA, 409 bp, Homo sapiens
  misc_feature (1)...(409): n = A,T,C or G
acgcccacgcgtncgtccacgcgtncgaccagcaagagaaaacccatgcggagcccagggtgtcccccactgcccaccagccactgcggtcaacgtgaagggcaagggtgcaagcgggatcgcgtcacagggagccgagtgagcccagaaagtaggagaaggacgtttccacccacctggagcgcagtccgtttgcagccggcggcagaatgctgctgtctccatcaataaagtccatgttagccacctagaggataaaataccacgaggaggagtagcaaggtgcccctgttgacagatcttgaagcacaagctcactcccagaagcacagctgcctagtcaacaaacagctgacaatacatgtctgaaggagctcagctgggaacagaagaatggccccactgagcc

SEQ ID NO: 36245 - DNA, 425 bp, Homo sapiens
aatcaccccatttcagagttatcaagagacactcccccctccattcccacccctcatacctacacccaaggttgtcaactttggattgctggggccaggccccatggagggtatactgaggggtctataggtttgtgattaaaataataaaagctaggcgtgtttgaagcgcttttaactttggcaaaaaaaaaaaaaaaagggggggcctttttaaagaatccctgggggggcccaagtttacccgggcatgcaagagtatatttttttccttataggggggcgaataaaaaactacctgggaatttttggaaaggaaccttatttttgggggggacatattgggccaacctccctcccaaaatttaaagctttaagggaaataaaaaatttttaaggggttagggggtaaaccacctcgattg

SEQ ID NO: 36246 - DNA, 482 bp, Homo sapiens
  misc_feature (1)...(482): n = A,T,C or G
gtggttnnnnnnatgatnccctcggattgatcgcatgcggaccgcccggattcccggtcgacccacgcgtccgtgtagctgcaaggaacactaatgtttatacaactgtctttccacccagtggtgcaactggttctgattcaggcttccgattcctttttatttttcactttttcctatgtctgaattcttttttttatttgcgaccttgattttgatgaggggctggggagtggggagggagtcgaaccaagacttggagttaaaaggattttcatcttttgcatccaacaggcaaaatatgatctgtgcccaaaagtgaacttgagtcaggaatgaatcactttctgcctaaccaagcacaaaaatttattctgctggctgactggaagcaaaaaagtccagatggaatatgacgaattccaacacaatggggcaccaaggcctttaggcctctctttttattttgcttgggtttctgg

SEQ ID NO: 36247 - DNA, 417 bp, Homo sapiens
  misc_feature (1)...(417): n = A,T,C or G
aggcgctgagcttaaactgaagcaagttcggtggactccggcggcgccctgatctaaagaaacgactcagggactgcggcgcttgcacgtcaacgggaggtgtgagcccaaagaaatgggacgtcggtcatcagatactgaagaagaaagcagaagcaagagaaaaaagaaacaccgtagacggtcctcctcgagcagttcttcagatagtagaacatacagccgaaagaaaggaggaaggaaatcaagatcaaagtcaagatcttggtccagagatcttcagcctcgttcacattcttatgatagaagacgcaggcatcgatcaagcagtagctcttcttatggctccagaaggaaacgaagtcgaagtcgttcaaggggtcgagggaaatcctatagagttcagaggtctaggtn

SEQ ID NO: 36248 - DNA, 410 bp, Homo sapiens
tatatcagtagtttattcctttttattgcaatatattattccatcatatggatataccatagtttattcatcatttgatgaacatttaagttgtttctactttttggacattacgaataaagctgccatcaacattaatgtacatgggtctttatgtggacatatgttttcatttctcttaaatataggggtggaattgctgggtcatatggtaactatgtttaacattttgggaaagtgtccatggatcacttttataaaaataaaaaaagttataagaatgaaagcagaggcctcttggcctcactagactagttctcaagccttcttaagtctaatttgccaagcctaatttgccacttcacccgaaaaggatgtttaaagaggccactgatttaaaagctctgtgt

SEQ ID NO: 36249 - DNA, 416 bp, Homo sapiens
atctttatcagtctattttgggagaaaaggtaccatacctcatatttattcctaggagtgaagaagatgatgcacacaatgtacaagcagtaattgattcactggccttggactacttgcaggtcagcttgtctcacataacaggagaaaatatagtgaaaggagataaagaatctattaagaatctcctggaaatatttgaaggttagttggagtatcttacagaacgcatcagtgaaacatctcatgagaaaagtgctccttgtcttctgagatgttgggcccctcttgggatggagatgaagcagaatccactggtgaaatcattatacttggagacacagcacacaccttttctctaagaagtaatggtgctcaatgtcctaatgaaaagctgtctaaaaaagccttatcct

SEQ ID NO: 36250 - DNA, 422 bp, Homo sapiens
gaggaggagtagggccgcctcggggctgggcatccggcccctggggccaccccttgtcagccgggtgggtaggaaccgtagactcgctcatctcgcctgggtttgtccgcatgttgtaatcgtgcaaataaacgctcactccgaattagcggtgtatttcttgaagtttaatattgtgtttgtgatactgaagtatttgctttaattctaaataaaaatttatattttacttttttattgctggtttaagatgattcagattatccttgtactttgaggagaagtttcttatttggagtcttttggaaacagtcttagtcttttaacttggaaagatgaggtattaatcccctccattgctctccaaaagccaataaagtgattacacccgaaaaaaaaaaaaaaagggcggccgttctaag

SEQ ID NO: 36251 - DNA, 423 bp, Homo sapiens
ctgccctggcctcctggagacactgggagcccttcgagccatcccccccgcgcagctgcaggaggaggccttcatgtcacaggtgcacagcgtggtgctgtcagagcgggacctgcagcgggagatcaaggcccagctggcccagctgcccgattccgcgccgggacccccgccccggccacaggtccgcctcgccggggcccaagccatctttgaggcccatcagctggcaggagtgcgacgaggcgccaagcctgaggtgcctcggattgtggtgcagcccccggaggagcccagaccaccgcggaggaaaccccagacccgcggcaagactttccatgggctcctgactcgggcccggggcccccccatagaggggccccccaggccccaacgaggctccacctccttcctggacacccg

SEQ ID NO: 36252 - DNA, 460 bp, Homo sapiens
agaaaatataaaggagactccactattagagaacttaaagcaaaactttctggtgttgaagaggagctacagcggactaagcaagaagtcctctctttgcgaagagagaattctacactagatgttgaatgccacgagaaagaaaagcacgttaatcagctacaaacaaaagtggcagttttagaacaggaaatcaaggataaggaccagcttgttttaagaacaaaagaggcatttgatacaatccaggaacaaaaggtggttttagaagaaaatggtgagaaaaatcaagtacaactaggaaagcttgaagctacaataaaatcattatctgcagaacttctgaaggcaaatgaaattatcaagaagttacaaggggatctgaaaactttaatgggtaagttgaaattgaagaatacagttactattcagcaagaaaaactcttggctgagaaggagg

SEQ ID NO: 36253 - DNA, 373 bp, Homo sapiens
  misc_feature (1)...(373): n = A,T,C or G
cccacgcgtncggctgaacgcgtgtgtacacgggactgacgcaacccacgtgtaactgtcagccgggccctgagtaatcgcttaaagatgttcctacgggcttgttgctgttgatgttttgttttgttttggtttttggtctttttttgtattataaaaaataatctatttctatgaaaaaagaagcgtctgtatattttgggaatcttttccgtttcaagcattaagaacacttttaataaacttttttttgagaatggttaaaaaaaaaaaaaaaaaaggggcggccgttttaaaggatcccttgaggggcccaagtttacccgggcatgcagacggttatttttttccctatagggaggcgcattataaa

SEQ ID NO: 36254 - DNA, 427 bp, Homo sapiens
ctgaggagggtggcgagaggtggggtggggcccaggtgagtagcgggcgaaggcggggcctgaggaggactgagctggggcgggacccagcagctgctccaagcttttctgccatttgaagcttcttctgggagccagctgtgaccagaggaatagctccagccatccggttaaaagtttaacaaccggaacagctccagtctgcagctcccagcgtgatcgacgcagaagacaggtgatttctgcatttccgactgagagtctcgctctgtcatccaggctggagtgcagtggcacgatctcggctcaccgcaacctctgcctctccgttcaagtgattctcctgtttcagcctcccaagtagctgggattacaggttttagctaaagaagatactgaggcagctattcaatcaatattatacaaa

SEQ ID NO: 36255 - DNA, 478 bp, Homo sapiens
agctcactatactgagacatccccgaaccccgggcaccacgcgtcgggacataatgagacccctttaaactgtcttattttccaccagattgagaaccagatgttctctacacactatcactgttcaatagagctttcttcagtgatggaaatgctctgtaatctacactgttcagtacaggtagctacagagcatctgaaatatggctagaaactacatttttgttttgattaatttaaatagccatacagttgctaccatactggtcacggcagctgtagactgactgggtccatagttcatcacctcaaaattctttcaaaatttattatctctttctctccttacatgtttatttcccaggccctaccctgggattagaacagctgaagggcctttcttgttaggctgtccatgccctaaggatgggttcctgtttatccttgccacgcagctgagcttactgcatgtttatat

SEQ ID NO: 36256 - DNA, 409 bp, Homo sapiens
gtactttctctatggttggaaaactatacactaacccctggcctgaaaggaaagagtgctctgaaaaccagggatttctggcattggaagcgaatgctattcccacgcagaataaattaggagctgaggtgtactggctggtgacactcagattctagtgtggcagtactagcttcaactctctaaataaatttcaaggctttgtgaaaataacctctcttctcattcaagggtatgtttactggttccattcaacaaatatttaactgagcacttcctaactgtaaaaggatagtgtttgcatctagaggactagagacatgcctgcacatccctcaccttcaaaggtgaactctacacaagattcttgtcctagtcattgtggcaaccccatctgacaccttgtgta

SEQ ID NO: 36257 - DNA, 449 bp, Homo sapiens
tcatgatggctggtatcgatgactgctacacctcagcccggggctgcactgccaccctgggcaacttcgccaaggccacctttgatgccatttctaagacctacagctacctgacccccgacctctggaaggagactgtattcaccaagtctccctatcaggagttcactgaccacctcgtcaagacccacaccagagtctccgtgcagcggactcaggctccagctgtggctacaacatagggtttttatacaagaaaaataaagtgaattaagcgtgaaaaaaaaaaaaaaaggggcggccgcccggggaaaaaaggcagcgcgggggccctaaagtaaccctggagggccccaacttaactctctccttaaagggagtggttttatccctatggggggaatctttaaaaaggacctttccttctgtgggagagaatattggaccag

SEQ ID NO: 36258 - DNA, 485 bp, Homo sapiens
  misc_feature (1)...(485): n = A,T,C or G
cccaggttctaaattaactaaatgtgtacagaaatgaacgtgtaagtaatgtttctacaggtctttgcaacaaactgtcactttcgtctccagcagagggagctgtaggaatagtgcttccagatgtggtctcccgtgtggggcccagcaatgggggcccctgatgccaagagctctggaggttcttgaaagaggggacacgaaggaggagtgactgggaagcctcccatgccaaggaggtgggaggtgccctggaaatagctgcctcatgccacttaggccatgactggatttaatgtcagtggtgtgccacagtgcagaggctagacaactgaaaggggctaccaaggctgggaaaaaaatgcaattgttgctgtgagtgactttgaaagacactnttgcattactgtttgaatttcagaagggcaccacaaggcaccagagtctttcaaacagtaatgcanaagtgtctgcattagaatttn

SEQ ID NO: 36259 - DNA, 425 bp, Homo sapiens
ctctgggatctcacaacgggcaccaccacgaggcgatttgtgggccataccaaggatgtgctgagtgtggccttctcctctgacaaccggcagattgtctctggatctcgagataaaaccatcaagctatggaataccctgggtgtgtgcaaatacactgtccaggatgagagccactcagagtgggtgtcttgtgtccgcttctcgcccaacagcagcaaccctatcatcgtctcctgtggctgggacaagctggtcaaggtatggaacctggctaactgcaagctgaagaccaaccacattggccacacaggctatctgaacacggtgactgtctctccagatggatccctctgtgcttctggaggcaaggatggccacggccatgtatgggatctcaacgaaagcaacacctttacacgctt

SEQ ID NO: 36260 - DNA, 380 bp, Homo sapiens
  misc_feature (1)...(380): n = A,T,C or G
cccacgcgtgcgcccacgcgtncgcacagcaagaaaaagaatttttaaagatgaaaagagcatcactgagccgtgggacaacttcagtcagcctaatacatggttaattggagttcatgaagaagagaggaaaagaaagaagaaatgtttgaagaaataacgcctgaaaacattccaaacttgatgaaaactataaacccacagatccaaacaccatggcagaccccaagcacaagaaacatgaagaaaacaataccaagctacatcataatcaaactgcttagaacctatgacaaagagaaaatctgagaaacagaccantngaaaacacaaaaaaaagaaggaatttgggagacagaggtaggagaattgcttgaccc

SEQ ID NO: 36261 - DNA, 403 bp, Homo sapiens
  misc_feature (1)...(403): n = A,T,C or G
taagagaaagggggcagggaagcaatatagcttccattctaaggctgtattcccgttatgaattactagctgattacagttcagagcattgatcctggaatgtgtgctggagaaatttaaaatactggggttttttgtttaatggtgcctatttagagttggaagttgaacagctgttgcattacatacttttgcttttttattgaaattttgaaatcaaacgtcttgatttttctgttctgttgaattgctatgttcaggatgttctagggggtgggggcagggactcttttcgtaataagcacttgttttattttgtgtgtgtggagtataaaggctacacccttattgtaaaaaaataataataataaaatgaaagaaacaatcaccaccaccattaana

SEQ ID NO: 36262 - DNA, 377 bp, Homo sapiens
tttgatgcattgtttggaaaatttgcaatacaaactggcataagaattacttattctgatgatgcacttgtatgtatttttcattagaaagtagaactaactttagattttcagcttgatggattttcagtttttaatgaagaattttctttaccattagtcttcaaattggatactgttgtgcagtggtgtactgttctacttcacagaaagggtaagagtacctctagttcagttcctatgaggtagctgtaacccttaaaaatgaaacgtcaactctagggtacatttgacattgaaagaatagttaggaaataactcggttttgatagggtcatgactaagacatgatatattggttttatttatggaattgc

SEQ ID NO: 36263 - DNA, 265 bp, Homo sapiens
ttattatcaaagcgctaatagagacacctatctgcatatgcctgcgtgttgataataaagatctatgtatttcaaattttgctatagataccaatgaagtattacagcattattgagagatcatatcacaccagttctaagtgttaataataataatacggcatacagaaactgaagttacctgccacattagacgtctggtagaaaaagtgacaaccaaaagtagaacccaagattcttaactgcagccatttctttacgatct

SEQ ID NO: 36264 - DNA, 399 bp, Homo sapiens
attaaatgtgatagagtatatgtcatgttttaggtgtgatgaacattcagttatgtgtgacgaataggataattgaaaaaatatgaaaggctatgatgtcagaaagtattatgggacaagatcttaaaaccagtgttacccagggagtatgaatttaatatgggaattcttaaactcctttatgactggaagatgagcatcagagtgtctgcgaccatttgatgatattatgtaccaagttttagatgtttggcttttttcaggttatgaaagcgggggatgagttaagaaccactgctgtgaaggattcatcaactatttttaggcagttgggtaaaaatgaccaatttagttttaagaaactgactgtggctccagagtatgttggagaagtgaaaa

SEQ ID NO: 36265 - DNA, 387 bp, Homo sapiens
  misc_feature (1)...(387): n = A,T,C or G
nttgancccccttaggtaccgctgaggaacttctcggtcgacccacgcgttcggggtctgcacgatggagttcttccggtctggcgtgctcctgatcagagttactctgatctgaacattttggcgctcaaggcattaagataatagcctgagttgttcatggagctcttcatcagtatgtctgaaaccattaaatataatgacgatgaccataagactctgtttctgataacactaaatgaacaacgcctggaaggagaattttgggaccttgctattgtggatgaggatgtgaaattcagacctcacagatgtgttcttgctcactgcaacacctactttaacatgcttttcaaagaaaccttgaaggttgtggattaaggtctc

SEQ ID NO: 36266 - DNA, 445 bp, Homo sapiens
  misc_feature (1)...(445): n = A,T,C or G
ttgaacgcatgcggccgcgacccacgcgtccgtncagacacagaactgaaaaggtattttggtgcccgggcaatcctgggggagcaaaggccacggcagagacaacgtgtgtaccccaagtgcacatggctgaccacccctaaaagcacctggccccgctacagcaaaccaggtctgtccatgcggctgctggaatcaaaaaaaggcctctccttctttgcgtttgagcacagtgaggagtaccagcaggctcagcacaagttcctggtggccgtggagtctatggagccgaacaacatcgtggttctgctccagacgagcccttaccacgttgactcactcctgcagctcagcgatgcctgccgctttcaagaggatcaggagatggctcgagacctcgtagagagagcgctgtacagcatggaatgtgcgttccaccccctgt

SEQ ID NO: 36267 - DNA, 410 bp, Homo sapiens
cgacttcctgcgggaaacatggcggcattgagcggagtccgctggctgacccgagcgctggtctccgccgggaaccctggggcatggagaggtctgagtacctcggccgcggcgcacgctgcatcgcggagccaggccgaggacgtgagggtggagggctcctttcccgtgaccatgcttccgggagacggtgtggggcctgagctgatgcacgccgtcaaggaggtgttcaaggctgccgctgtcccagtggagttccaggagcaccacctgagtgaggtgcagaatatggcatctgaggagaagctggagcaggtgctgagttccatgaaggagaacaaagtggccatcattggaaagattcataccccgatggagtataagggggagctagcctcctatgatatgcg

SEQ ID NO: 36268 - DNA, 423 bp, Homo sapiens
cgcagcagccaccgccgcgtccctctctccacgaggttgccggcttaggacccccagctccgacatgtcgccctctggtcgcctgtgtcttctcaccatcgttggcctgattctccccaccagaggacagacgttgaaagataccacgtccagttcttcagcagactcaactatcatggacattcaggtcccgacacgagccccagatgcagtctacacagaactccagcccacctctccgaccccaacctggcctgctgatgaaacaccacaaccccagacccagacccagcaactggaaggaacggatgggcctctagtgacagatccagagacacacaagagcaccaaagcagctcatcccactgatgacaccacgacgctctctgagagaccatccccaagcacagacgtccagacagg

SEQ ID NO: 36269 - DNA, 424 bp, Homo sapiens
  misc_feature (1)...(424): n = A,T,C or G
ttgtgcaactgttgctacagctgtggagcagtatgttccctctgagaagctgagtatctatggtgacttggagtttatgaatgaacaaaagctaaacagatatccagcttcttctcttgtggttgttagatctaaaactgaagatcatgaagaagcagggcctctacctacaaaagtgaatcttgctcattctgaaatttaagcatttttcttttaaaagacaagtgtaatagacatctaaaattccactcctcatagagcttttaaaatggtttcattggatataggccttaagaaatcactataaaatgcaaataaagttactcaaatctgtgaagactgtatttgctataactttattggtattggttttgtagtaatttaagaggtggatgtttgggattgtattattattttactaatn

SEQ ID NO: 36270 - DNA, 412 bp, Homo sapiens
  misc_feature (1)...(412): n = A,T,C or G
atactactatttgtttaaaatgtaaaaatattgttacctttacttgtgatacacagaatattacctacagatttcagtgtggtaagaatataacattgaccagagaatttttttttgtggcacaatgttgttctagatattatttaatcttactctctgccctttctctcttcctccctgcctctcttgttctccctctgtttgacttttttctttcttgtctttttcttgggctgtggtatatttagagtcaaataattaaattacctatacaattcaaacaaattcacaaaataaatgaatacttttcatgaaaaataaatatctaaaaattgaaagtcaattaatttacaataattttcttggcaattgttatacacaggcatttgtgaagagatcatgaaagaagggn

SEQ ID NO: 36271 - DNA, 432 bp, Homo sapiens
cggacgcgtgggcgggcgagtccccggctcctccagctccttcctcctcttcctcctcctcctccacctccggcttttgggggatcactgtcctctctcggcagcagaatgagccggcaggtggtccgctccagcaagttccgccacgtgtttggacagccggccaaggccgaccagtgctatgaagatgtgcgcgtctcacagaccacctgggacagtggcttctgtgctgtcaaccctaagtttgtggccctgatctgtgaggccagcgggggaggggccttcctggtgctgcccctgggcaagactggacgtgtggacaagaatgcgcccacggtctgtggccacacagcccctgtgctagacatcgcctggtgcccgcacaatgacaacgtcattgccagtggctccgaggactgcacagtcatggtg

SEQ ID NO: 36272 - DNA, 426 bp, Homo sapiens
tgaatttagaaccacacaatgccaagatagaattaatttaaagccttaaacaaaatttatctaaagaaataacttctattactgtcatagaccaaaggaatctgattctccctagggtcaagaacaggctaaggatactaaccaataggattgcctgaagggttctgcacattcttatttgaagcatgaaaaaagagggttggaggtggagaattaacctcctgccatgactctggctcatctagacctgctccttgtgctataaaataaatgcagactaatttcctgcccaaagtggtcttctccagctagcccttatgaatattgaacttaggaattgtgacaaatatgtatctgatatggtcatttgttttaaataacacccaccccttattttccgtaaatacacacacaaaatggatcgcg

SEQ ID NO: 36273 - DNA, 454 bp, Homo sapiens
  misc_feature (1)...(454): n = A,T,C or G
agacttcggagtacctgcgctatgaagacacgcttcttctgtaagaccatccaacaggtgagaatgagatggtgatcatgagacctggaaacaaatatgagtacaagttcggctttgagcttcctcaggggcctctgggaacatccttcaaaggaaaatatgggtgtgtagactactgggtgaaggcttttcttgaccgcccgagccagccaactcaagagacaaagaaaaactttgaagtagtggatctggtggatgtcaatacccctgatttaatggcacctgtgtctgcttaaaaaaaaaaaacatatttcactaaattaaaaaaaaaaaaaaaatctttcttcgggtcctctttataaaaatttttttgggggggggattataaggggcgggggcccttaataacttttttcttttggggggggagttaagtctctggggggctcttctn

SEQ ID NO: 36274 - DNA, 416 bp, Homo sapiens
  misc_feature (1)...(416): n = A,T,C or G
cggacgcgtggggcanaaaactgttcagagatctgttcccattgcaatgaaggcatctggacataccaggggtgatgggcagaatctgtttacgaaagacgtgacagtgatcgagggagaggttgcgaccatcagttgccaagtcaataagagtgacgactctgtgattcagctactgaatcccaacaggcagaccatttatttcagggacttcaggcctttgaaggacagcaggtttcagttgctgaatttttctagcagtgaactcaaagtatcattgacaaacgtctcaatttctgatgaaggaagatacttttgccagctctataccgatcccccacaggaaagttacaccaccatcacagtcctggtcccaccacgtaatctgatgatcgatatccagaaagacactgcgt

SEQ ID NO: 36275 - DNA, 162 bp, Homo sapiens
  misc_feature (1)...(162): n = A,T,C or G
agattttgannaanacctcggctgctgccttcgccggttcccattctacttttggcctccgcccactgattggttgccgcggtctttactgcttttctccctgatgtgtgaaacaagcgccttctatgtgcctggggtcgcgcctatcaaatttcaacaaga

SEQ ID NO: 36276 - DNA, 426 bp, Homo sapiens
cccacgcgtgcgctctgaccagcaccatggcggttttttagaacaagtgccttacgaaaggcggcctgaagggagccaagaagaaagtggttgatccattttctaagaaagattggtatgatgtgaaagcacctgctatgttcaatataagaaatattggaaagacgctcgtcaccaggacccaaggaaccaaaattgcatctgatggtctcaagggtcgtgtgtttgaagtgagtcttgctgatttgcagaatgatgaagttgcatttagaaaattcaagctgattactgaagatgttcaaggtaaaaactgcctgactaacttccatggcatggatcttacccgtgacaaaatgtgttccatggtctaaaaatggcagacaatgattgaagctcacgttgatggcaagactaccgatggttact

SEQ ID NO: 36277 - DNA, 458 bp, Homo sapiens
agcattcgggccgagatgtctcgctccgtggccttagctgtgctcgcgctactctctctttctggcctggaggctatccagcgtactccaaagattcaggtttactcacgtcatccagcagagaatggaaagtcaaatttcctgaattgctatgtgtctgggtttcatccatccgacattgaagttgacttactgaagaatggagagagaattgaaaaagtggagcattcagacttgtctttcagcaaggactggtctttctatctcttgtactacactgaattcacccccactgaaaaagatgagtatgcctgccgtgtgaaccatgtgactttgtcacagcccaagatagttaagtgggatcgagacatgtaagcagcatcatggaggtttgaagatgccgcatttggattggatgaattccaaattctgcttgctagctttttaatattgatatg

SEQ ID NO: 36278 - DNA, 431 bp, Homo sapiens
  misc_feature (1)...(431): n = A,T,C or G
cgagaggctgaggggatctggcggtggagcgctaggatcagacgcccccgcgatgaccagctcccccgtctccagagtcgtgtacaacggcaagaggaccagcagcccccgctccccacccagcagcagcgagatcttcaccccagcccacgaggagaacgtccgcttcatttacgaagcctggcagggtgtggagcgagacctgcgaggccaggtgccgggtggcgagcggggcctggtggaggagtatgtggagaaggtccctaaccccagcctgaagaccttcaagcccatcgacctgagtgacctgaagcgccggagcacgcaggatgccaagaagtcctagagcgcccggtgcccctccccggccttcggaagatcanggtgcgaggtggtcgttcccttctgtcctgtggtcctgcccctgggag

SEQ ID NO: 36279 - DNA, 427 bp, Homo sapiens
cccacgcgtccgctcacgcgaccggaaacaggagagcgccgagatgcggatacctgccctccacgcctacagtgaagagcctgctcagcctgccggcctgggtgctgatggatgaggacgtccggatcttcttttaccagtcgccctatgactcagagcaggtgccccaggcactccgtcggctccgcccgcgcacccggaaagtctggagcgagtccccgcagggcaacagcgttgaccgcatggctgctccgagagcacaggctctatttgacttcactggaaacagcggactggagctgaaattcaaagctggagatgtgatcttactcctcagtcggatcaacaaagactggctggagggcactgtccggggagccacgggcatcttccctctctccttcgtgaagatactcagagactaccg

SEQ ID NO: 36280 - DNA, 418 bp, Homo sapiens
  misc_feature (1)...(418): n = A,T,C or G
gcgtgggcagttcaacattccatagactctgtcgcccaaggccaagggcctcatccgaagcattctgcgtcgggagccctcagagcggctgacctcgcaggaaattctggaccatccttggttttctacagattttagcgtctcgaattcagcgtatggtgctaaggaagtgtctgaccagctggtgccggacgtcaacatggaagagaacttggaccctttctttaactgagctcatgccccacggagacttagcaggttccaggagtgagcgagggcagcggaaaggagttcttccgggggacacgaattgcctgctgagtagcaagaaagacacactcttaagtttcttggttcagagcaggaaaaccttcaaggagctgactgaccacgtagcatggnggcaagaggcgtggga

SEQ ID NO: 36281 - DNA, 423 bp, Homo sapiens
aagccaatgttctgggccttggggcttcctgcatggtaagaggaggactgccgatctctaaggatcttccgtggtctatgggtttatgactcgaaactcctcaaagtgcagaaacacaagccacatcccttctcaaggccagacacatactaggagctctattaatacctgaataaaaaccacggatgaagagcttgcctggccctggcatttctataccaaaccaacacaccatggatcattgtatcttccctgggacagaccctcagagcctacaagtgactctacaacttcactgatacagatctattattccttagcttagacttccatctctccagatcaaccttcaggaaaactaggaaactatcaataatgatttcaattgtcggcttcaaattcaccttatttcttctaccccag

SEQ ID NO: 36282 - DNA, 424 bp, Homo sapiens
cagaagtattagggaagagagagagacttagagagagagagtgtgtgtgtgtgtgtgtgtgtgtattttagatatgtattggctgctatgtgtggactgcccacacacaaactgagtgttttccccttggagtcaaatgtgaatcagaatcagaataaagcattcaaagcctctaagctctggtgctaatctttttaaattgtggacaccagagagtgtgaggctagaagcccaaatcttccctgtcccgtctagctgtgtgaaccaggacactcaaaatctctgctaatcatgtgaaacaagaccactattgccaccctccctagtacgcaggtttagtttatgaataaaattagataatcaatgcaagagatttttttaaatgtaggcgcctaccatgatataacttcatacagttcaacag

SEQ ID NO: 36283 - DNA, 416 bp, Homo sapiens
  misc_feature (1)...(416): n = A,T,C or G
gctacaaaaacaaacctgtgttgtttttgtatagattgtaggtttatttttggatttcatatacatgactgaactgtgtgcaaggcaatagttagccttgattttagcccagagacagatggcagagctatctctctcatagcttttatgcccttatttttattcaactggtattaatgtttttctcctgaaactactttttttgatgtgggcaagagatttgaagtgttggcttttgctatgtgcatattgaattgaagagtgagtangtgaaggtggtgctggtgggttcactttccaaggccagactaaaacagttattttctataaaaatctggaagcaaagaatggggatggggagagctacgtggtagtatgtttttattaagagaataatgcaataaaatatgtaatgg

SEQ ID NO: 36284 - DNA, 476 bp, Homo sapiens
  misc_feature (1)...(476): n = A,T,C or G
agggcgggggnaaaatgaagcatcggatgaacccgtgaataccggctcgacccacgcgtccgcggacgcgtgggcggacgcgtgggttcggattttggttcaggagcgcctgacacaggatgcagttgctaaggcaaatcaaacaaaagagggcttacctgttgctttagacaaacatattcttggttttgacacaggagatgcagttcttaatgaagctgctcaaattctgcgattgctgcacatagaggagctcagagagctacagacaaaaatcaacgaagccatagtagctgttcaggcaattattgctgatccaaagacagaccacagactgggaaaagttggaagatgaacacttgaggacttcagcttctcacctacttagtacagttgggaaccatacacttctggcatgtttggaaatcaaaatgtcacattctcgggggaggaagcccagaaaattgggtatgttn

SEQ ID NO: 36285 - DNA, 418 bp, Homo sapiens
  misc_feature (1)...(418): n = A,T,C or G
accacgcgtgcggtggggatacttattcactgcctcaaaccaatgatcaatgagatgcacataattaactggttccatcaagactgtgcacccaggccttacaggccaacctttttctgtgtgtggctaatatttaaaactagaaaaactattcctaatcaacagggagcggagagattattcactgtcttatctgcagaaattggctgtcaatatataacccgcactgcacgggaaagagtatagtgtgatgaaataaaaggactgatgctaatgtggacatggcaaaaaaaaaaaaagggcgtccccatcaaagagtgacacctgggggaccaacactgcggcgtgagtgagggagctaatctttaccctaaggcgggcgaggatattgcgccttcgggaagccttggaaggaccn

SEQ ID NO: 36286 - DNA, 460 bp, Homo sapiens
ccactccccagctgtgaaaggaggagctctacggtgactttgtagacttggaaacaggggacgtgcacaagggaaaatcgggccccgatactcagaatgaagatgtagagaaacaaggaagaaattgaccctgacgaagaagaaagtgccaagaaaaagcgtttggataagaagagaaaattgtaggagatgtttgatgtggaatatgatgaaggagaaagcacatattttgatgatcttaaaggagaagtgcagaaacaagcacaggtcacagcatacagggttcccccccccaccccgtcatgtacagctgaatcatgcagaatttgaagatcaagatgatgaagccagagctcagtatgagggttttcgacctgggatgtacgtctgcgttgagattgaaaatgttccctgcgagattgaggagaatttgacccccgctaccccattatgctgggag

SEQ ID NO: 36287 - DNA, 380 bp, Homo sapiens
cagggttgttgtggggatgctgcctgatacataccctgtcaccatttggtctctgcttcctctctgggacagggcctagaattggaggcagagaaccttcctatagaaagtcttcgtgtgtcctaggacttggctatcgtagagtggtaccttaggcagtggatgtgactcacactttcaggagtcaccccccagcatttggggttgggttggccctactccagcctggagctccctgagggagcctgcactccctgctcccaatccccgctactggtgcagggatgcagcctggagctggcgtccttgttctgggcctgctgctgccgccaccccaagaggccccaggcctgtgctgaattgacatcagtgcttccctg

SEQ ID NO: 36288 - DNA, 436 bp, Homo sapiens
  misc_feature (1)...(436): n = A,T,C or G
ttcataagatggggacgttaagcatgcagcaactacagtcatttgttctcagaggtctggaccaaagagaaacaagaaaagctggagtcacactaccaaaggccgaagctgagcaacagagctctggagtcagctgcctgggttcagcatgcagcgctgccgtggacgatctgtctctcttgcatatatgacttaccagttttactttcagtctctccatttctaattaaatgagatgcagaaatgctggtgccttgctatgatgtttgcagttattatttctaggaaaaaaaatattattgttactcagtatctggtacatcaaaactaagccagaaacgtttaaaaagaacaaaagtatcatttctacttaattctctagctacttggacaactggactatgcccctcctttcaagggagggcaaagcatttcn

SEQ ID NO: 36289 - DNA, 401 bp, Homo sapiens
  misc_feature (1)...(401): n = A,T,C or G
tcatacccctggcagggcactagggccttcactcctttctccccttccatcctttctttaccagtgccacccatgtccctagctcccgggtattggggctgaggctctggggcctgtctccctgccagcgtgagggcaagaccccagagccttagctgagcaagcccagaggggcagcgtggcccctccctccccttttcctgccccgtcccatgcctcagcttgctgcttgtgccanttgcctgtttcgcttcagtggttgattctagcacttacatgtggcctccccaccaagccctctatctgcttctaatccttcaagccctggccccctccccgtaacagtgacttttccagggaggaagaggcagcaggagctgttggccttggtttgcacagan

SEQ ID NO: 36290 - DNA, 425 bp, Homo sapiens
cggacgcgtgagggaataaccaagaggctgtgtcattttttaagaggatggcaaggatgacctcaaatgagctcaacaaaactgtgaatccaaggaatggtgcttgtagggaaagagaggtcagttgtggtccttaaacctcttggcaccttgtgcgggttataaaacacggagctggagtaaaattgcccttacccccaatccaaatgctgtccaggatttaggagctacccaacctgtggctatatggtgacggtttccattttttgatcgtttgcttgtttccaaaatagccttgcttggtactgcatggaaagttcaagcttttcttcttgcccgctcaaggctggcctcttccccgtgtcttcacagcgtccctaaagaagatctttgcagcactctctggagctgaggggagtgaaatt

SEQ ID NO: 36291 - DNA, 402 bp, Homo sapiens
ttataacatagtgactttcaaagatatgtaacacatgtgctcttaagcttttgcctttttgtcctattattaacaagtcagtaaagttaacaggtaaagtactgctaatgggtacaaattaaggaattgcagcaaaaaagtattgcctactaactctgacattataccttgtttgtacccgccagcgggaacttcattgcaggccctgtgtcgcgctgacttcacgattctcacaggcccgctcaatgcggacagggtacgagatgctcacgctctcgaatgctgccgtttggtatggtctcttccaacatcctgtatcagcattataaaataaaatggatacttcaagctttgccttcacttatttctttgctttttaaaaactatttgtaatgtaatttt

SEQ ID NO: 36292 - DNA, 408 bp, Homo sapiens
ctcggaaatcatctgtggatctcaatcaagttagcatgctttctccagctgccctatcacctgccagctcatcacaaagacatgaaagctaaaaaagaaaacacctcaagagcttttggttttacttttttggtttttgttttttgtttttgttttttaaaaaattgataaactgtgcatacttcattcacaacagattttctatacattctacatttaaacagaagtacacagttactgttaaagatgcagtattatctctcagatatttgctttattactgttttttgtaaatttgtttgtcaggataaacttgatgtgttaggaattaaacatgtatatttaggtgccaaatatgattgttaaccatatgtaacttattaaatatgtttacagtttatctcagac

SEQ ID NO: 36293 - DNA, 400 bp, Homo sapiens
  misc_feature (1)...(400): n = A,T,C or G
cccacgcgtncggcgtggtctacgccgagtgacagagacgctcaggctgtgttctcaggatgaccgagtgggagacagcagcaccagcggtggcagagaccccagacatcaagctctttgggaagtggagcaccgatgatgtgcagatcaatgacatttccctgcaggattacattgcagtgaaggagaagtatgccaagtacctgcctcacagtgcagggcgagatgccgccaaacgcttccgcaaagctcagagtcccattgtggagcgcctcactaactccatgatgatgcacggccgcaacaacggcaagaagctcatgactgtgcgcatcgtcaagcatgccttcgagatcatacacctgctcacaggcgagaaccctctgcaggtcctggtgag

SEQ ID NO: 36294 - DNA, 406 bp, Homo sapiens
  misc_feature (1)...(406): n = A,T,C or G
cccgctccagccatgccgaataaaaacaagaaggagaaagaatcaccaaaagcagggaagagtggaaaaagttcaaaagaaggacaagacacagtagaatcagagcaaatttccgtcaggaaaaacagccttgttgctgtcccgtctacagtatctgctaaaataaaagtaccagtctctcagcccatagtgaagaaagacaaacggcaaaattcttcaaggtttagcgcaagcaataatagagaacttcaaaaactaccatccttaaaagatgttcctcctgctgatcaagagaagctttttatccagaagttacgtcagtgttgcgtcctctttgactttgtttctgatccactaagtgacctaaagtggaaggaagtaaaacgagctgctttaagtgaaatgn

SEQ ID NO: 36295 - DNA, 460 bp, Homo sapiens
  misc_feature (1)...(460): n = A,T,C or G
atattgggctatcggaagcatcngcaaaaatncccgggagattcacgcgnacgccctgttattgaccctgccaggctgaacccaaagatccagcattgtgactggaagggcctgcgaaagaagagcccttgcgcgagtgatctctgtataatcgtctttcagagacttaataagctttggagaatatttggatgaagttggcagttttattgataccatctgattctactttggtcctgtagcagtttctgccactttgtcaccagtggggggaatatgctgttaccataatggaaaaggaggacatttggtagcatttttctgtgtttatgtcaggagtcgtctaaaatggtcattttttttttttttaaaaaaaacaccatttgcgttcaaagtgggggtttttattttgggggcccatgccttttatgaaaccagaccttcaaggcattctaatcac

SEQ ID NO: 36296 - DNA, 402 bp, Homo sapiens
aaataataaaaaattatattctagtttactaacataagcacattagaactcataaaggagtatatatcatgatccttgaggtaaaatatcattaagtttctgaaaaaaaggttaggaattaacaactatatctaagttaattattctctcccttaatttttgtgccatttttctctggtctgattcttcatctctcttgataaaccttcacagctttcgtatttggcttctgcttctgcaactaccctttagcattattcaccaggatttcattcccttctggtcttattttacattttcttttttctttttttttaagatggagtttcactcttgtcgcccaggctggagtgcaatggcacgatctcagctcactgcaacctccccttcatgcattcaagc

SEQ ID NO: 36297 - DNA, 408 bp, Homo sapiens
ctccaggtcatgcgatggctgagactgctgattctggagtaagtggaaatgaggtagcactctgtttcagcaatactatcctacgagagtgatgggactaataaagtactgctacaataagggaggtggagcagctttgtaatcacttgctttttaaaagtttttagtgttattctaactgattaggctatttatttgttgaagcggagtcttgctctgtcgcccaggctggagtgcagtggcacgatctcggctcactgcacctctgcctcctggattcacaccattctcctgcctcagcctccagagtagctgggactacaggcacccgccaccacgcccgactaattttttttgtttttagcagagacggggtttcaccgtgttagccaggatggtgtagatctc

SEQ ID NO: 36298 - DNA, 394 bp, Homo sapiens
  misc_feature (1)...(394): n = A,T,C or G
cacaagcctaatggcttatctgagtaagcagggcttataaattcactttcttgatactcagtcttgccttctaaacactccttgatcttgcctacctctccccttttccacatgtcttttcctgtaggaacactttctccatttattcctgcctatccaattcttccctatatttcctggaccagctaaagtccagtgtttccagagacttttgaaagtcaacttacactttttccttcttcattcacaaagctcttcttccctgggccctggtatgtatgcctttctctcctactgtctaatagcacctcgtaaattgtcaatgaacttttctaaggggtattcttgaattcccaactagattgtgagcttctggaagacaaggctatgtctn

SEQ ID NO: 36299 - DNA, 229 bp, Homo sapiens
ctcttatcttcagtggagcttaggaaacgctcccactcccacgggccatcgagggcccagcacggctgagcggctgaaaaaccgtagccatagatcctgtccacctccactcccctctgaccctcaggctttcccagcttcctccccttgctacagcctctgccctggtttgggctatgtcagatccaaaaacatcctgaacctctgtctgtaaaaaaaaaaaaaaagg

SEQ ID NO: 36300 - DNA, 401 bp, Homo sapiens
cccacgcgtgcgcggacgcgtgggcagaattcaccactacataattctgtgtcaccaaaagccacttgtacccccaaaagaattagggttgctcaaccgttagtgtaaggtaaataatccaaaacacttagggtcccaagtatttcagataagggatactcagcctgtacgtacactcatgaactctacgcacttggcacttaattagccttttttcccaatctaagtggtaaaattgaatatgcaaataaatggcttcaaaaaagatttggccgggcgcggtggcccacgcctgtaatcccagcgcttttgggaggccgaggcgggtggatcgcctgaggtcgggagttcgagaccagcctgcccaacgtggcgaaaccctgtctctgctgaagatacaa

SEQ ID NO: 36301 - DNA, 425 bp, Homo sapiens
cccacgcgtccgcggacgcgtggggcattataatgtgtgcctgcagtcccaactactggggaggctgaggctggaggatagcttgagcccgggagtttgaggctgcagtgagccatggtaacaccattgcacttccatctgggtaacacagcatgaccccatctcaaaaaaaaaaaaaaaacaacccccaaaaatttttggccctttaatttttttggaaaaaaaaataaaaaaaaaaggcttttaccccccccagtttttataatatttaaaaagtcccaaatggtttttaacccctttttgggttaaaaaggggataaagggcggggtttcaaaccttgttttcttattgcccttgtcctaaggggacatgtttttataaagaaaaaagcggggttttggtgttttaagccacttctgctcaa

SEQ ID NO: 36302 - DNA, 425 bp, Homo sapiens
  misc_feature (1)...(425): n = A,T,C or G
cgtccaacgacaagacgaggattctcaacgtccagtccaggctcacagacgccaaacgcattaactggcgaacagtgctgagtggcggcagcctctacatcgagatcccgggcggcgcgctgcccgaggggagcaaggacagctttgcagttctcctggagttcgctgaggagcagctgcgagccgaccatgtcttcatttgcttccacaagaaccgcgaggacagagccgccttgctccgaaccttcagctttttgggctttgagattgtgagaccggggcatccccttgtccccaagagacccgacgcttgcttcatggcctacacgttcgagagagagtcttctggagaggaggaggagtatggccgcctcggggctgtgcatccggcccctggngccaccccttgtcagacgggagggagg

SEQ ID NO: 36303 - DNA, 399 bp, Homo sapiens
tggacgcgtgggaaaaaaaatcagtttatagtaatgttggagaaaacgagggtgatggaggaggggtgagggggatgtctgcaatgtcagcactgattgcaacaccaaactcaaagacaggaccgctcatgccactgccaacatacccctggctttctcaacaactttagaattattatattgccctaagtgcatctaaaatatgacctttggtccctccctagaaacccaatgtatgtcttcttgcttaaaagagcggcttcagagaaaagacaaaagcaaactgaagaagttggaatacctacctacaggtggatcaggcctatgaaaaccacattcaccacaccatctcccaactcctcttctacattttaggaaacaggattctcccatagcatg

SEQ ID NO: 36304 - DNA, 422 bp, Homo sapiens
agcttaggccgctggttttggtgatttttgtctgattgcaatgtctggacgtggtaagcaaggaggcaaagctcgcgccaaagcgaaatcccgctcttctcgcgctggtctccagttcccggtgggccgagtgcaccgcctgctccgtaaaggcaactacgcagagcgggttggggcaggcgcgccggtgtacctggcggcggtgttagagtacctgaccgccgagatcctggagctggccggcaacgcggctcgcgacaacaagaagactcgcatcatcccgcgccacttgcagctggccatccgcaacgacgaggagctcaacaaactgctaggccgggtgaccattgctcagggcggcgtccttcctaacatccaggccgtgcttctgcctaagaagaccgagagtcaccacaaggccg

SEQ ID NO: 36305 - DNA, 419 bp, Homo sapiens
ctttcccaccgctgccgggaaatcgaggctcgccttaaacggatttgcgtgaaaccagcccaaggttccgggcccccccaaccgagccccgcgcccggggactgactcggggaccgactcagggacctcccgagcgccaggactcagggcccgacctgcagcggctgcaggcccagcgcccgcaagcggcctgggccgagcgccgtttccaggccctcgccaggtctttgaactgcagatcaagtgttgacagtcaccagtcaggaggagttcttaaagagttttatgttgactgaatattgcacattgagtccccattgagtccctggtgggaaaagtccacaatttcccattgatagctttttactgttgtgaaaaagggaagcgtcagccacacaaaagcctgcatgaccgctgct

SEQ ID NO: 36306 - DNA, 413 bp, Homo sapiens
agagaactgggggaccctggagagaatcttaaacctgaacaggtttctagaactggtgggagagaacaggagatgttgcacaagcactcgccaccaagaggcagacccgagatggcaggagcaacgcaggaggctcagcaggaacagaccaggtcaaaggagaaacgcctccaagcccctgttggccaaaggggagcagatgggaagcatggagtgctcacgtggttgagggaaaatccaggaggctctgaggaaagtgtgcgcaagctccctgggccccttgcaccatgaggcttcctgcaaaccagcagcacccctaggccctctgtgggtgaggcccctttggttggagggggacagcctggcctgtgagcatactgctgatgacgcccagatatgcatttccttctacc

SEQ ID NO: 36307 - DNA, 380 bp, Homo sapiens
cccacgcgttcgtccagtagagcaactgaatatactgggctatttgtacttttttatagagaactgtaataataattctttaaaaatgagtttttagaacaaagcaactgacgatttcctaagattccaatgccctggagcttgtaggaggacttatcctgggtcagctggagcacccccgacctgatctcccactgccagattttcccatgctcctagggtatggagtccacgtgggaatgactgcaagttcaggtggaacttggccgactgatgctctgcgagtttttaatagacactgaggacaactgcttaaggtttaaaaacttccaaaccacaggaaagacatttttagtgtcccccatccagaggcagccctg

SEQ ID NO: 36308 - DNA, 400 bp, Homo sapiens
cggacgcgtgggtctagatcacatgggtgcttgtgccttccgattttcttgcatttgtttttttcctgacctgaagttgttgttacaaaatcagtcagactttgtgggctgaaggacacggtgcagcagagggtgtccctgtgagagttctgcagagtgctgggcatgtgcctggaactaccgagtaggagccatttctttgtacccctgcctaatccattcctctccttccaagtccattgttgcaagcaatattcttctcaatttttatatgtttactttaaatcaaagttagtctatttgtataaaatttttaaaaaaaaaaaaaaaaaaaaaaaaagggggggccgttttaaaggatccttgggggggccaaagtttacgggggcttggaaggtat

SEQ ID NO: 36309 - DNA, 448 bp, Homo sapiens
cttgtgtctggacaggaatgtgtcatttcccacatcttctagagggctgccagctgggaagacagttatcagggcaagctgtgctctgagtttcgggttctgctcctacaaagaacgtgcggtgctgcgggcgagggccccggcacggacaagggccactgcagagtgtgtttctgctcgtcagctgccctgggcagcggatgggctgggcgatgcagctggatgcacatctcgttctgtcatgaatgtccagtaaaaatctgaattggttgcaaaaaaaaaaaaaggggggggccgttttaaagaatccttgggggggccaaggtttacgggggctggggaggtattatttttttccttatggggagccgttttaaaccctacctgggatttttggaaaggaacctttctttgtggggggggacataatggaccaacctccctacaa

SEQ ID NO: 36310 - DNA, 427 bp, Homo sapiens
  misc_feature (1)...(427): n = A,T,C or G
gcggtggcgcagagaggggtgcggagcgggcggaataggcgtctgtgtcgcagcttggtctcagaggagcatcgctgggaacaacgactatcgtctattccacaagatgagtaacagccaccctcttcgcccctttactgcagtgggggaaattgatcatgtgcacattttgtctgaacatattggtgccttgttgattggggaagaatatggcgacgtcacattcgtggtggaaaagaaacgttttcctgcccacagggtaattttagcagccaggtgccaatattttcgagcattattatatggtggaatgcgagagtctcagcctgggcgacagagcaagactttgtctcanaaataaataaattaattaatcagagatgaatacgaagacattacaccaatactgcagaaatttaaaggatcn

SEQ ID NO: 36311 - DNA, 460 bp, Homo sapiens
cccttctggagcccgaggcctggcctgtcttcgttggggctgataaattgcctctcccagggcctgctgggtgagtcaccatcccaaagcaggaagggtgccctggagagaaccaccctcctcctactctttttccacttcctcctctttctttccccagctgaggaggaacctggggcatttagggcagaggacaaaaggatgtcagcaattgcttgggctgcttggctatgcaagcctcctgcctgctgatggccacttcagggacagcctgggcccaggcacccagggggatggcggcagcttcctgcacctttcagatttcttggtggcattaaagcattttcagaacaaaaaaaaaaaaaagggggggccgtttaaaagaacccttggaggggccaaggcttacccgggcaggcagaggaatagttctcctcttaaaggagagcggataataggc

SEQ ID NO: 36312 - DNA, 471 bp, Homo sapiens
  misc_feature (1)...(471): n = A,T,C or G
gggcgggggnaactgacgctgcgtattgtcgtcttaaaaacggcncgacccacgcgtncgaatttgcacaatatttctttagttgaactttatatgttgcatacaatacacaatgccctttggtntctatgaaatgtttggggggatatttgtaaaactttaattatagggacttaccctgaggggtgatgaagccatgaatcacagcagtgccaggtctactaatcagccctgtccagaatggccatgtagaatgtactccacttaccaatggctagccatctgaagggagcagctttcattgagcaaaacaaaacagcaccaaacccaagttggctgaagctcttgcctccaactgatgtggaaagtgaggtagcacctccccggaacctcatctattggggcacaggcagctcatcagaattggcggctggaaccactgaggcacaccatcaggggtactccgccatg

SEQ ID NO: 36313 - DNA, 427 bp, Homo sapiens
  misc_feature (1)...(427): n = A,T,C or G
caaacctgtatttaaaaagaaacagaaatgaccacgtgaaatttgcctctgtccaaacatttcatccgtgtgtatgtgtatgtgtgtgagtgtgtgaagccgccagttcatctttttatatggggttgctgnctcattttggtctgttttggtcccctccctcgtgggcttgtgctcgggatcaaacctttctggcctgttatgattctgaacatttgacttgaaccacaagtgaatctttctcctggcgactcaaataaaagtataatttttacctgcggaatataagaaagaaaaggaaccctccctaaagggggggggccctttttaaaaaatttctggggggccccaattttccgcgtttggccggagaaaaaattttttcttttttgggggcgactttaaacccaccttggtttttttgtgg

SEQ ID NO: 36314 - DNA, 406 bp, Homo sapiens
cggacgcgtgggataaaaattgaagagctcattttatgtcaaaattacaaaaatttgtaatagctttttacactataaaagttgctttcaagtttactattttgtttaagggatttattttgttttgaaaattaagcatcctttgaaagaatgtattacctgcacttttataaattaataaaagtttacaattcaaagaaagcacctaaaaattagtaaaatcttttatagttattatttaaatgaaaattttttatttttcgttagaaatttgtgggctccctgtcagttctctcatgggttggcatctctcgtagtagcagtgatcatacatgggtgtcaataaatggctcagcgatcaaattgaagtaagttgtttgaatgatgctatatagtacaagaatat

SEQ ID NO: 36315 - DNA, 416 bp, Homo sapiens
  misc_feature (1)...(416): n = A,T,C or G
ctccaaattatttgtcagggagcctggcgattctgccaagaaggcaggtgttttgcccttagagcctatacagttctcttggagaaattgtctttcaggcaccactgttaatcactgagactgattctaatgcaaagcagggaagacagaggcagaaaccaggagagtggtagatcagtgcagcccagatatcggaatggaggagcaaagtttcattcacggatgtttgttgaatgctgctgcccaactcttcctttgtcacctctaggctattccactaagttacttataaactggtggctttaactgagggctgtgtanaggtactatttggcatgtgaagtcaggataaatttatcgaatgtccgttttccacatgcaactgtgttacagaagtagtaaaattggaaaatatg

SEQ ID NO: 36316 - DNA, 423 bp, Homo sapiens
  misc_feature (1)...(423): n = A,T,C or G
cccacgcgtccgtgagcatttaaccatgccgcgaggctgcctccttagacagaacgggctgccctgggagtctacaagttcacagtacagaggcattggagcagaggctagggacatctggctggggtgctgcaaaggagactcatgggattcaatcatcttaaaggtcctcccaactcctagggcatacagatccacacactcattcagcaaatatgcacagagtgccaggctgtgtcctaggaactaagaagatgatgttatcgaaagaaggaggaggaagagaagggcacagaggaggagagaggaaagaaagggggaagagagaaaggaggaagaggaggagaatgggaacagcaactaaaaatttttaaaaacaatttttttaaaaaattcacatcactattaatataataggggctn

SEQ ID NO: 36317 - DNA, 482 bp, Homo sapiens
  misc_feature (1)...(482): n = A,T,C or G
gtggcgannnaattgatcccctgagaaccgttgagcacctgcaggtcgagccacgcgttcgccgacgcatcccgaggcctcttttcctgaagaaatccaatcctagccctcattttaattatgtacatctgtttgtagccacaagcctgaatttctcagtgttggtaaggttctttacctaccctcactatatattattctcgttttaaaacccataaaggagtgatttagaacagccattaattttcaactcaatgaaatatgtgaagcccagcatctctgttgctaacacacagagctcacctgtttgaaaccaagctttcaaacatgttgaagctctttactgtaaaggcaagccagcatgtgtgtccacacatacataggatggctggctctgcacctgtaggatattggaatgcacagggcaattgagggactgagccagaccttcggagagtaatgccaccagatcccctaggaag

SEQ ID NO: 36318 - DNA, 473 bp, Homo sapiens
cccaaggcaaagggaaaatggagctgctgctaggctcaactgatggcgcccacatggcgcccaccccagctccttcagagactccatcatttccacagaagggccagaggccctgccaatatccgcacatcactggcatgatagaccataacagcttcttctgagccgttccggtctatcgtgtcaatgcgtactcggggagtcctcaacgcacggatcactgacacggcactacataacggctccttagcagccattattgggtatcaagtcaatgcctactcagggaggctttatcgcagaggcctgcacgagcagacacattccgaatactaaaattccttaggaaaattagtcattgcccatgtgtgatagctggtttccattttgaattttaaccattttgggaaaaggaagagaatgggaaataccagtatagtccgaaaagcccttaataaatgagtgcgaaagtg

SEQ ID NO: 36319 - DNA, 417 bp, Homo sapiens
aaacacatttactccccaataattgtacgggaggtgatcgaggaagaagaaccaagtgaaaaatcagaggccacctacatgaccatgcacccagtttggccttctctgaggtcagatcggaacaactcacttgaaaaaaagtcaggtgggggaatgccaaaaacacagcaagccttttgagaagaatggagagtcccttcatctcagcagcggtggagactctctcctgtgtgtgtcctgggccactctaccagtgatttcagactcccgctctcccagctgtcctcctgtctcattgtttggtcaatacactgaagatggagaatttggagcctggcagagagactggacagctctggaggaacaggcctgctgaggggaggggagcatggacttggcctctggagtgggacactg

SEQ ID NO: 36320 - DNA, 470 bp, Homo sapiens
  misc_feature (1)...(470): n = A,T,C or G
caaatatacacatatgatattggtttgggacataattattttattattatgcttattttgctgttcatttacctgaataaaaattatttagataaaatttaataagcagaccaggcatagtggctcacacctgtaatcctagcacttttggaggctgagatgggagtttagcttgaacccaggagtttgagaccagcctgggcaacattgtgagaccctgtctctaagaaaaatgaaaacataaaaattancagggtgtgattgtgcgtgcttgtagtctcagttacttgtgaattgaggtgggagggttgcttgagcccaggaggtcaagactgcagtgagcaatgattgcaccactgcacttccagcctgggcgacagagtgaaccctgagtcatcatcctataattctttatttagaggctgacggtattagtagattgatccatcttatgtaattggtaaaacact

SEQ ID NO: 36321 - DNA, 408 bp, Homo sapiens
atttatgtatcaggagaccaaaaagaaataatatcttatgatgtaaaagatgctattgggataagtttattaaagaaaagtggtattgaggtgaggctaatctcagaaagggcctgttcaaagcagacgctgtcttctttaaaactggattgcaaaatggaagtcagtgtatcagacaagctagcagttgtagatgaatggagaaaagaaatgggcctgtgctggaaagaagtggcatatcttggaaatgaagtgtctgatgaagagtgcttgaagagagtgggcctaagtggcgctcctgctgatgcctgttctactgcccagaaggctgttggatacatttgcaaatgtaatggtggccgtggtgccatccgagaatttgcagagcacatttgcctactaatggag

SEQ ID NO: 36322 - DNA, 395 bp, Homo sapiens
ctgagatttggccgaaatggtcttggggtagtcgcgggagtttggaagtgggggtaaggttgctggaaggtttcaaggtctctcatctgctccctctccgtttcccatgaaatgcccttgtttaacgggctgtggtgccgaactccgggatcactcccacagcctggaagggagccgttgcctccagctgcagtgcatcaagggagctcggaatagaccctgccctctgtcagctgcaccagtggctgtccatggggggagaggcagaagcctaccagaatttcctgtcttggctccccagatcagaatcaagggacttctggcctctggactgaggaagtgacattctgtttttcaaaggaagtgttgttgttgcggagtacaagtgtgtgtca

SEQ ID NO: 36323 - DNA, 415 bp, Homo sapiens
  misc_feature (1)...(415): n = A,T,C or G
ctcatagagagaactcagctgcagtgcaaaaggccattgcccactatgaccagcagatgggccagaaagtgctgctgtccatggaaaccctacaggagctgctggacctgcacaggaccatggagagggaggccattgaagtctttatgaaaaactctttcaaggatgtataccaaagtttccagaatgaattggagactctactagatgctaaacagaatgacatttgtaaacggaacctggaagcatcctcggattattgctcggctttacttaaggatatttgtggtcctctagaacaagcagagaagcacggaatttattctaagccaggaggccataatctcttcattcagaaaacagaagaactgaaggcaaagtactatcggtagcctcggaaaggaatacaggctgn

SEQ ID NO: 36324 - DNA, 402 bp, Homo sapiens
cccacgcgtccgaaattttactacctcgttaacccttttcttaaaatattctctatctttctatgtctctttctgacatagtaatcccaaaggattgtgttactccccgtgaaagttattacttttcctttaaaaatggttttataataagactgtttaaaacctttccagtattggtacatcttggcttctggcccaaaccccaagcagaaaagaaaatggaataatggagcattgtttttccacattagtattagggcatcagattcttggtgaaacactataattaagtagttataattaaataactgttcttcatacttaggactcttaatacatttctttaagacttgtaagtataattgtaaagcttgttaactgtttatatactaaagaaaaagg

SEQ ID NO: 36325 - DNA, 397 bp, Homo sapiens
  misc_feature (1)...(397): n = A,T,C or G
ctgaggaaaatcttttgcaagaggaagcatcttacatggcatctgatcgtacataccaaagagaaaccccacaagtgtcttcactgtgagaaaaccttctgttgccaaatgtcatttgtcacctaaggagtcatattagaaaatcacgcagcttagagccttattctccatccgaattcatcctggaaaaacacccagtggttattacgcacttgggaaaacctttagctccatctttctcattagtttacagtgcaatgttatctcaggaatttttataaacagaaagaggtgacatagaaaagaaaatgaaatgcagacactgcttttatactgttgtcttgtatgtacatttctgtcctgtgtcaggaaagttagtaagggtaggcctttgtan

SEQ ID NO: 36326 - DNA, 419 bp, Homo sapiens
cacacaggagggaaaatcctgggattctttttctatggatgtaatacatatatttacaaataaaatgcctcatggaaaaaaaaaaaaaaaaaaaaaaaaaaaaaaaaaaaaaaaaaaaaaaaaaaaaaaaaaaaaaaaaaaaaaaaaaaaaaaaaaaaaagaaaaggggggggaaccactaaaaaaaattgtggggaaacaaaaaaatttcctgtacgctgtaaactaactctttctatataaaaataaaacatataaaccttaagaaacaagttttaaaaaaacttttctttttgaggttttaaagaattacgaccccaacccaaaaagaatagaagcggagggggaaaacaactaactttggggttgtagatataaaaatcaacctttcatgcctgtataaaaaaatttttcatgag

SEQ ID NO: 36327 - DNA, 414 bp, Homo sapiens
  misc_feature (1)...(414): n = A,T,C or G
agagcattaagaaagctgcggtggtctgagcaacatagcccagagggctgagcctcctggcctgcctgcccgcccaccctgggagtcccagtggtgaggctcanagaacttctaaggggaaagaacagctggagtttctgttgatgtgaagaaggcagctcttggcctcccactcccacacttctttgcctataaatcttcctagcagcaatttgagctacctgaggaggaggcagggcagaaagggcaagggcctgcctctgacctgccgtgtcctttgcaggaaggaggtaggcacctttctgagcttattctattccccacccacacccccaggcagggttggaaatgaaggacttttttaacctttgttttgttttttaaaaataaatctgtaaaatctgtcaaaaaaaa

SEQ ID NO: 36328 - DNA, 394 bp, Homo sapiens
cagggacctcctgctgggtagattccagggtctactctgtggtcatgagttcaagccagaggagcccaggatgggattagacagtgaggaaggctggaggcctctgttccaaaagacagaatctcctgctgtgtgtcctaactgtggtagtgaccacgtggttctcctcgctgtgtctcggggaacccccaacagggagcggaaacagggagagcagtctctggctccttctccgtttgccagccctgtctgccaccctcctggccatggtgaccaccttgacagggccaagaacagcccacctcaggcaccgagcacccgtgaccatggtagttggagcctcagtcccccccctgagcgctgtggcctccgctctgtggaccaccgactccgg

SEQ ID NO: 36329 - DNA, 393 bp, Homo sapiens
atctatatacagacagcctctaaatcaagtccttcagtataattgatatatgtttttataatttcctcactggtataagtgtttcatatttgaaaaagttatctctgggtattgcataaaaggcttcatcttataaagtgaaatcattgttattgaattttaggaaggattaatggttaagtgtatataaaatactaatattaagtaaacttcatattggccaacaccagggttgtattctatggatgtcattattttgaattaagaattagtgtttaacattcctaaattgttttgagtgcttgattataatttgtaaaaaatgtttattttcaatacttctttaaatttaaaataaagcttatatttcaaaaaaaaaaaaaaaaaaaaaac

SEQ ID NO: 36330 - DNA, 429 bp, Homo sapiens
  misc_feature (1)...(429): n = A,T,C or G
aaccccaatgagccttgggtcatttgctcagtgtctgaggataacatcatgcagatatggcaaatggctgaaaatatttacaatgatgaagagtcagatgtcacgacatccgaactggagggacaaggatcttaaacccaaagtacgagaaatgtttctgttgaatgtaatgctacatgaatgcttgatttatcaagcgccaaaaaggcattgtatagtaggaaatgtaagtggggtggcttatggcttctttatcctctgattctagcactttcaagtgagctgttgcgtactgtatcatattgtagctattagggaagagaagaatgttgcttaagaaagaacatcaccattgattttaaatacaagtagcagggtattgcctttgattcaactgttttaagtcctcattttctcanactaagtgct

SEQ ID NO: 36331 - DNA, 397 bp, Homo sapiens
cccacgcgtccgcccacgcgtccgcagttcgagatgggtattgtcttgtgaaaactgaaagctgggctgggacacaggcaagagagtctctgactcacaaatctccatcgtgggctctctggcctttctgatattcttttcacacatcaattctgggccaagacacatccatgctcatcaagaaggcattgataggagaatcaggtagcctccagagagacaggaagcagataaacaccctcatgttggcctcctaagcccagaggagaaaaaaaaaagttggaggggaagaagttcaagaagccacactagaagccactgattaccatcacctcggcacctgtcctccatctgcccctctttcaagtgaggaccagactcaggggacagcacctgc

SEQ ID NO: 36332 - DNA, 512 bp, Homo sapiens
  misc_feature (1)...(512): n = A,T,C or G
tgggccgggganaagnaaacctgaagntctcggaactgagggcctccggagnngccccacgcgtncgcaaaaaactgtggactataagaaattatctgctacataaattattgaagcttttcagaatttacaactctggtgacttctgatgtcttagaaaggaaggtgaatatagtcaaagcgtggcattgagataattggactgaagaccagtttgatgagaagcttttatttaaaactgatatatttgttgccagttccatatttttaccttccttaagagatgttttactcttcttattttgtataatttttatgctctttgattatctaataaggccagtatttcaaaagctgttctgaatttatccacagtaatatagtctgaacacaaatagtttacttaacttatctttggaaatattcaattttggttattacaaaacagaaaagaacaacagcaacaaaaacattgtgtgaatatatgtttgtatgtgtgtatgtatatcatg

SEQ ID NO: 36333 - DNA, 387 bp, Homo sapiens
tgtaactgaagacctaatgaaggagtcagatgcttacaactatttataatgcatcaatttgaacttagaaggtaggagatcagatcatatgtgggaaaatgtaaaagcagggatatcagtgggcattagaataaaaactagggatacaataacttctttgcatatgacaatacttatttgtatataagagaaagaacgaaataacctttattgaaataaagatactatgcaagaaaatgtacagttgtcgaagtggagaaaatgaggatatcttgcagacgagctataggtcatacatgaatgtctagtgagacattcaaaattcgtatagggtgcagagtaatttcttattgtgaggaactgtccaatgtattgcaagatgttctg

SEQ ID NO: 36334 - DNA, 411 bp, Homo sapiens
  misc_feature (1)...(411): n = A,T,C or G
tgaagctgtattcttaatacccactgcagaagtgtcattaaaataatatacagtggaaccagaaagagggttctgtaagaattagccatagcagaacaaaattatagaattttaaatacctctacccaagtagaggtatttttattcagacacctactttttatttataaaaaaatgcattttctattatcaagttcacttatgaaataaaaattataacacatattttccatttagcgtgcctaacatcctaccttgccttctatgagtctttcttctaatactacacctctgccttattttagttcagggtttcactaagtaacccctacattaataaatgagtatggataatgctaatatttgagcaatacagaggattaagagatcaagatacttcactgcctattn

SEQ ID NO: 36335 - DNA, 414 bp, Homo sapiens
aaaaacgagaaggaaaacaaatttagtaatggcacaattgaagaaaagcctgctttgtacaaaaagcagatccgacataaacctgaaggaaagattcgccctcgctcgtggtcttctggctccagtgaagcaggctcaagttccagtgggaatcagggagaattaaaagcatccatgaagtatgttaaagtaagacacaaggcacgagagattcgaaacaaaaaagggcggaatgggcaaagcaggctttctttgaagcacggtgaaaaggctgaaaggaacattcatactggaagtagtagcagtagcagcagtggttctgtcaaacagctgtgcaagcggggtaagagacctttaaaagaaatagggagaaaagatcctgggagcactgaaggaaaagacctgtacatggag

SEQ ID NO: 36336 - DNA, 422 bp, Homo sapiens
  misc_feature (1)...(422): n = A,T,C or G
acacaagacagtggcagtggttacttttacagtacagaaaataacagaatagccttctgtaatgaggcgtttgttagagttttgcatgagattctaatacttcagtaggaccctacctacgtggttcatctacaatggttaccataaaaaatctggcaggattttaaaactcaatcagtctttcctttgagctagtgacttgaaaagaaagagagaaggaaaagagaccatattaagtccatgccagttgcttggctagaatatgatcaacgacttgtagtagactcaagtttttaaaaaacactattttacttaaactgtttcttatctaaattcttgcagagtgtcaatgttatcattgattatagaagacagggataatacctttatctctggccactcaaaaatgcagtgccaggagn

SEQ ID NO: 36337 - DNA, 473 bp, Homo sapiens
  misc_feature (1)...(473): n = A,T,C or G
cgggggaaaatgatcgcatggactgagcccgtaggaaccggcncgacccacgcgtccggattcatttttccctagacagcttcagtcctaccagccacagatccctctaagtgagttgtctgaccctttcctgggggcagattttgggtttgggggaagacagacccactacatgagggagcctgagtggtctttgggagaagggttagaaggaaagaggggcttggttccctaggaccagctccctggaggttgccccgtatcagctgccttcagccttgccttaaaacccactccctggccaggaccccgttcttctaaggattgcgttctggcttagggctgcatgcaggcaaacatgggagcctgagaatgggctctgcaaaggagcagtaatgggttgagggtctcctgacaggtcccacagccatgccctggctgagaaggatcgagaaagagcagggaggctgggn

SEQ ID NO: 36338 - DNA, 397 bp, Homo sapiens
cccacgcgtccgcaaataatcattaatcttctgtggagcttccttggaaaaggaaactcttgctgttgctttgaacagtttcaaatccttcccctcccttgttttcaggcaactaagacttctctttctatatataccacccttagtacttcattatcccttgtatcatatggaggctgtttcttgcctctcctgtgtgcatgaaatcacacacaaacttaatttgcacagcttgctgcaggacctagtggatgcctggtttgggagcattgctcctaacagctagtatggggttagctggggaagcggactccagcttccaagtaggcctgggaagagggcctgttcagagtcagtgcccccagcacccaagatgggagggtcctgacactcagta

SEQ ID NO: 36339 - DNA, 409 bp, Homo sapiens
  misc_feature (1)...(409): n = A,T,C or G
aatcgcttgaacccgggaggtggaggctgcagtgatccgaaatcacaccattgttctccagcctgggtgacagagccagactccgtctcaaacaaaacaaaacaaaagacatcagctagctggtccaagcacagtggtgttcacaacgaattgatcacagccaggtagaattcttcattctttctccagatccactgctttgcttgaccagccttaaagacacacatacacatttttgtctgggcgcgctggctcacacctgtaatcccaacactttgggaggccaaggcaggcggatcacttgaggtcaggagtttgagaccagcctgaccaacgtggagaaaccccgtctctcctaaaaatacaaaattaaccaggcatggtggcacacgcctgtaatcccagctan

SEQ ID NO: 36340 - DNA, 472 bp, Homo sapiens
  misc_feature (1)...(472): n = A,T,C or G
gggcngntnnnnnnaactgacgtcttgngaccgcnctcgaattccggtcgacccacgcgtccggaaaggcactgacattagcagaataagtgatggacattagttgaaccccttcagtgtctatgtgttttattgtattgtctttaactcgttcttgaagcacagatttcagcgagcctttcagccattcagtgccagcggttttccccactcaagaaagatggtgtgagccatacacacagcaggattagacggggagagtttcagctgcagcttctagtttaagaccaaagcccttcctcccgctgctgcatctgtctgagaggggaagctcttgttttccaagctggaaccgtttatgaggaaaactgagcagggtggcaaaatggaaaaggaacaattttctagtttttcctacgcgtgatattgaggcgtgctttttctttgatttgaggtacagcatgtaaataac

SEQ ID NO: 36341 - DNA, 424 bp, Homo sapiens
  misc_feature (1)...(424): n = A,T,C or G
cgcagactgggtaatgataacaaagcatcgtaaaaccttcagaatgaaaggagaacgctttgtgtaccactatgcttttcttttttgcgtgtggcaagtttaagttattagtttttaaaatcaatactttttaatggaaacaacttgaccaaaaatttgtcacagaattctgagacccattaaacaagttcaatgagaaaaaaaaaaaaagggggcggccgttttaaaggatccttcgggggccccaacattacccgggagggcaaaggaataattttttccttatagggggtcgaaaaaaagcctacattgtaattttggagagcaaacttaattttttggggggaaaaaatgtgaacaaattccctactaaaattaaaacttttagggaaaaaaaaaaatttttaagggaaaaaggggttan

SEQ ID NO: 36342 - DNA, 433 bp, Homo sapiens
agcccggctgctcaatgacaaatcggtggaggacgtttggtgtccggccccgggagggggcggggcgcgtttaatagctgcgggccgggtgcggacggcggaggcggcgggactggtccctgctcttcagtgggtcatctgtgtgtcacagcctcagaagaccagcgagatggctgccaacaagagtaagggccagagctccttggccctccacaaggtgatcatggttggcagcggaggcgttggcaagtcagccctgacgcttcagttcatgtatgacgagtttgtagaagactatgaacctaccaaagctgacagttatagaaagaaagtggttcttgatggggaagaaattcagatagatattctggacaccgctgggcaagaggactacgcagccattcgagataactactttcggagtggggaaggg

SEQ ID NO: 36343 - DNA, 427 bp, Homo sapiens
cgtgcttttacggttccgggtactggctcccacaccactgcctcgtgtggggttgttcgcccgtgaaggggcaggacagggtgcgcgctggtggaggttagtgaggtcacacaccgggccgtggcgcctggtgcgctgggcgcttccacctcaaccttcgtagcaaacccagcggggttctgtgcctgcgcaccgaggttcctgcgttcatttactgtcccgtttctcactccggaaagtgtggctttgagtttgatctgcaggagtaggacgggcacagcgggtgtctggtcttcctcgcaccataaatcgcagagcgagccctctgtggtctctggatacagtataccaaagttagattaactgtactccttctcacaagccggtccaacgtttgcagcagtgaaaaagccctaagtgtcagggg

SEQ ID NO: 36344 - DNA, 404 bp, Homo sapiens
tgaatagtttttgttttatcagaatggcaacagacagaagtactttgtagagattgacttcctaagctacttaagacaacttgcaccactaagaaaaaaatgtacaaccatttggaaaaatgaaatttagtagttccaagtttcaaagaaatgtcaacattttattccattcaataaagaacaaaaccaatagtgtttttattactttcatctgaaacattccatgttttaatctgagccttgcagactttcatttggagtttgaacccgttttggttgcatttcatttttggagaacttaattaacgtgagattggcaattgaaatgcaggtgcagttttctgttaatgtcatgctgttgtttaggtaataagaaatattaagcaattggctatagattttgt

SEQ ID NO: 36345 - DNA, 424 bp, Homo sapiens
  misc_feature (1)...(424): n = A,T,C or G
tcaatattaaatacagacactaagttatagtatatctggacaagccaacttgtaaatacaccacctcactcctgttacttacctaaacagatataaatggctggtttttagaaaaaaaaaaaaaaaaaaaaaaaaaaaaaaaaaaaaaaaaaaaaaaaaaagggggggggcccttaaaaaaaaaccttgggggggcaaaaattaaagggggaaagaaaaaaaaaatttttttttaaaaaagggggaaaaaaaaaaccccggggggaaatttgaaaaaaaaacctttttttgggggggggaaaaaagggaaaaaacccccccaaaaaaataaaccctttagggaaaaaaaaaaattttaaaggggaaagggggaaaaaaaaccccaaaatcccttgcataaaaaaaaaaagccccnccttccgca

SEQ ID NO: 36346 - DNA, 403 bp, Homo sapiens
agaggatgctttcctgttcatggggtttttgccctggagcctcagcagcaaatgccactctgggcagtcttttgtgtcagtgtcttaaaggggcctgcgcaggcgggactatcaggagtccactgcctccatgatgcaagccagcttcctgtgcagaaggtctggtcggcaaactccctaagtacccgctacaattctgcagaaaaagaatgtgtcttgcgagctgttgtagttacagtaaatacactgtgaagagactttattgcctattataattatttttatctgaagctagaggaataaagctgtgagcaaacagaggaggccagcctcacctcattccaacacctgccatagggaccaacgggagcgagttggtcaccgctcttttcattgaagagtt

SEQ ID NO: 36347 - DNA, 415 bp, Homo sapiens
ttcttattggcaggggagctcatattgatgtacgtaacaagaaggggaacactccattgtggctagcagcaaatggtggacacctcgatgtggttcagttactggtgcaagcaggtgcagatgtggatgcagcagataaccgcaagataactcctcttatggcagcatttagaaagggtcatgtgaaggtggtgcgctacttagtcaaagaagtcaatcagtttccatcagattctgaatgtatgagatacatagcaaccatcactgataaggagatgctgaagaagtgtcatctttgtatggagtcaatagtacaagccaaagatagacaggctgctgaagcaaacaaaaacgccagcattttgttagaggagttagacttggaaaagttaaaggaagaaagtcggaggctggg

SEQ ID NO: 36348 - DNA, 422 bp, Homo sapiens
  misc_feature (1)...(422): n = A,T,C or G
ggaaggaaggtgtgttttctggactgatcccaattctgaactcttaccttgaaaacatggaagtggatgtggacaccagatgtagtattctgaactacctaaagctaattaagaagagagcatctggagaactaatgacagctgccagatggatgagggagtttatcgcaaaccatcctgactacaagcaagacagtgtcataactgatgaaatgaattatagccttattttgaagtgtaaccaaattgcaaatgaattatgtgaatgcccagagttacttggatcagcatttaggaaagtaaaatatagtggaagtaaaactgactcatccaactagacattctacagaaagaaaaatgcattattgacgaactggctacagtagcatgcctctcagcccgtgtgataatatgaagaccan

SEQ ID NO: 36349 - DNA, 403 bp, Homo sapiens
  misc_feature (1)...(403): n = A,T,C or G
aggaagcgcccgaagcaacccctcaaccttcccagcctggcccttcttcaccaatttctcttaatgctgaagaagagaatgctgaaggggaagttagcagggcaaacactcctgattcagatataactgaaaaaacagaagattctagtgttccagaaactccagataatgaaagaaaagcaagtatatcatatttcaaaaatcaaagaggaatacagtatattgatttgtcttctgatagtgaagatgtcgtttccccaaattgctccaatacagttcaagagaaaacattcaacaaagatacagtgattatagtttctgagccatctgaagatgaagagtcccaaggccttcctaccatggcacgtagaaatgatgatatttcagaactggaagacctttn

SEQ ID NO: 36350 - DNA, 406 bp, Homo sapiens
agtttcgctcttgctgcccaggctggagtgcaatggtgcaatcttagctcactgcaacctctgcctcctgggttcaagtgattctcctgcctcagcatcccgagtagctgggattacaggcatgtaccaccacacccagctaattttgtatttttagtagagacagggtttctccatgttggtcaggctggtcgcaatctcccgacctcaggtgatctgcctgcctcggcctctcaaagtgctgggattacaggcacgagccaccgcccccggcctccattcattcatttattcattcacttaatatatatttattgagtatctaccatatgtcagcttgtcaggtgctgaggatacaaaggtaaataaagcacagcttttgccccccaggagctcatagaggaaa

SEQ ID NO: 36351 - DNA, 398 bp, Homo sapiens
  misc_feature (1)...(398): n = A,T,C or G
ggccccggactccgacggcggctcggacgccgactcggaggtgggtccggggagcccgactcggaccgcggaggcagcggaggaggaaatggcaggtcctaatcaactctgcattcgccgctggactaccaagcatgtagctgtgtggctgaaggatgaaggcttttttgaatatgtggacattttatgcaataagcaccgacttgatggaatcacattgctaacattgactgaatatgatctccggtctcctcctctggaaatcaaagtcttaggggacattaaaaggttaatgctctcagtccgaaaattgcagaaaatacatattgatgttttagaagagatgggctacaacagtgacagtcccatgggttccatgacccctttcatcagtgctn

SEQ ID NO: 36352 - DNA, 480 bp, Homo sapiens
  misc_feature (1)...(480): n = A,T,C or G
ggggactggaatggagtcatcgcanacngcntcggaatttnagggacgacccacgcgtccggagttgcagccagggaagcctccgcggtggtgcaagtggaacccaagccttgaggtttcagtgagtagggggccgacgtgagctttagcgtccccctttatcctccctcttagattccttgaagaccctggtgcagcttancaagagggcccaggatttttggatccccagccctgtgacaagggttcctgtccagtttccccctcccaggatttcgactcagttcagcgaagtcaccgccccgtctgagaaatgaggacaccaaggcttagagcacagccccgaggcgccgtctaccaagccccgtcccctcccccggctcctgtcggtcagcactgaaaccccgtccctgctccaggcctccttctctggggtccaaggtcccatacaggcctctgcctcggccgcaggcccttcag

SEQ ID NO: 36353 - DNA, 415 bp, Homo sapiens
  misc_feature (1)...(415): n = A,T,C or G
cgggaagctagaaggctgctggaacgtgaacagcgattgagagtttaagaagaaatgagtgcgtatagaggagttggatagaaggcgcaaagaagaagaggagaggagacgggctgaataagaaaagatgagagttgaaagagaacaggagtatatcaggcgacagctagaagaggagcagcggcacttggaagtccttcagcagcagctgctccaggagcaggccatgtttctgcatgaccataggaggccgtacccgcagcactcgcagcaggcgtcaccatcgcatcagtaaaggagcaagtcaagctttcatgctccctagcccaaagcccactacgagcctgctgaccgagcgcgagaggttcctgtgagaacaacatctcgctcgcctgttctgtcccgtcgagattcn

SEQ ID NO: 36354 - DNA, 405 bp, Homo sapiens
cccacgcgtccggtaagctgtatgcgttctagctgtatgcgttctgtagtcttttcttaggtgggtaacattttcaataacgcgcgcacagcacacaggggtgccctgagccgaaggagcaaaaaaagccaccgctcgtttctataatccagctttgcttttcacaggcgtgggatccaggatggtgtcctctgtgaggacttgaactctggggctttaattccactgtttaattttcaggtaccacagcagcaaagcacagagtgtgacctttttcatgtctgagctgattctgtttgctccacgtgcctgcttcttgctactgttcatttagtaatgggatcacctcaccatgccatgctctgggctctccctctctgtccatttctgttttgctttcctggc

SEQ ID NO: 36355 - DNA, 470 bp, Homo sapiens
  misc_feature (1)...(470): n = A,T,C or G
cccggagaaccccactgtcactcgcgatgctccgaagacccgttaactaggcgaggaaggcggtggccgcctttttccagctgggaggaacaatcctgcaccatgactcaacagccacttcgaggagtgaccagcctgcgtttcaaccaagaccaaagctgcttttgctgcgccatggagacaggtgtgcgcatctacaacgtggagcccttgatggagaaggggcatctggaccacgagcaggtgggcagcatgggcttggtggagatgctgcaccgctccaaccttctggccttggtgggcggnggtagtagtcccaagttctcagagatctcagtgctgatctgggacgatgcccgggagggcaaggactccaaggagaagctggtgctggagttcaccttcaccaagccagtgctttctgtgcgcctgcgccatgacaagacgtgacgtgcttgagaccgcatctt

SEQ ID NO: 36356 - DNA, 440 bp, Homo sapiens
  misc_feature (1)...(440): n = A,T,C or G
atttctacagagactccacattcaggtgtaaaatactagacagacatctggcaatattgtccaagaaacacctcgagaccaaatttttgaagctgaatgtggaaaaagcacctttcctttgtgagagactgcatatcaaagtcattcccacactagcactgctaaaagatgggaaaacacaagattatgttgttgggtttactgacctaggaaatacagatgacttcaccacagaaactttagaatggaggctcggttcttctgacattcttaattacagnggaaatttaatggagccaccatttcagaaccaaaagaaatttggaacaaacttcacaaagctggaaaagaaaactatccgaggaaagaaatatgattcagactctgatgatgattagagctcaataattctttgtaaattgtctttttttttctgcttn

SEQ ID NO: 36357 - DNA, 405 bp, Homo sapiens
tgtggctacatacaaaggagttccctttgaggtgtatgggaatggagtatgtagggctcaaaccatgagcaacagtggaatcaaataaaatgcttccactaccaaaagacattacagaaaaccttaaaagtaataaagagaaatatatgtgtcacttatacctaaaaaatgagtggctcatttttgcattactctcttctagacttgactagacatttacttggtatatattgttttcattgattggggaaacactagatttttacctcggtttttgatcatttataatggagagaggaagttgcctatgttttcgaataatttattttttagcaggaatattgattagcagcttttttttctttatacacatagataactaactagagtaatgtttagtttctg

SEQ ID NO: 36358 - DNA, 417 bp, Homo sapiens
  misc_feature (1)...(417): n = A,T,C or G
gcgcggggacacggacgctttcagatcctagagggagtcaggctgaagaggcgggactttcctgtcgtaagagggcggaacttggagtcaggacttctcacgcgaaggcggggcttctcgattttcgagggggcggggctgactgggcctcctgatccccaaaaggggcggggcgggggcaagaggcggggcctctccttcccgggggcgtggtcacaagcgccggctccctccctgcagatggaagggcgagaacgtgtccacgcacgaggtggagggcgtgttgtcgcangtggacttcttgcaacaggttaacgtgtatggcgtgtgcgtgccangttgtgagggtaaggtgggcatggctgctgtgcagctagcccccggccagactttcgacggngagaagttgtaccaccn

SEQ ID NO: 36359 - DNA, 418 bp, Homo sapiens
atgctttgtaacagacttgcggttaattatgcaaatgatagttcgcgataattggtccagttttacgaacaacagatttctaaattagagaggttaacaagacagatgattactatgcctcatgtgctgtgtgctctttgaaaggaatgacagcagactacaaagcaaataagatatactgagcctcaacagattgcctgctcctcagagtctctactatttttgtattacccagctttttttttaatacaaatgttatttatagtttacaatgaatgcactgcatagaaactttgtagcttcattattgtaaaacatattcaagatcctacagtaagagtgaaacattcacaaagatttgcgttaatgaggactacacagaaaacctttctagggatgtgtgtggatcagatacatg

SEQ ID NO: 36360 - DNA, 438 bp, Homo sapiens
cagtcctgcctggccaggcagatctgtgccccatgcctgtccagcctgggcagccaggctgccaaggccagagtggcctggccaggagctcttcaggcctccctctctcttctgctccacccttggcctgtctcatccccaggggtcccagccaccccgggctctctgctgtacatatttgagactagtttttattccttgtgaagatgatatactatttttgttaagcgtgtctgtatttatgtgtgaggagctgctggcttgcagtgcgcgtgcacgtggagagctggtgcccggagattggacggcctgatgctccctcccctgccctggtccagggaagctggccgagggtcctggctcctgaggggcatctgcccctcccccaacccccaccccacacttgttccagctctttgaaatagtctgtgtgaaggg

SEQ ID NO: 36361 - DNA, 431 bp, Homo sapiens
gcggacggaaagggagacgccgtcgctgtcgccggggctggggctgaggctccggcgggagcgggagccggagatggagtcgagactgagtccatggttcggggtcatcgccccgtatctccagcgccgggagcctcgggactgcggccgtgtctgtggcagctggagacagagctgagggagcaagaggtgtcggaggtctcatctttgaactactgccggagcttctgccagaccttattgcaatatgcaagcaacaagaatgcatcagaacatattgtgtatcttctggagggatatcgacttgccatccaaagctttgccagtgcacgtccatacttaactactgaatgtgaagatgtcctcttagtgcttggcagattagtactgagttgtttcgaattactgctttcagtgtctgaaagtgaacg

SEQ ID NO: 36362 - DNA, 418 bp, Homo sapiens
  misc_feature (1)...(418): n = A,T,C or G
caagcccatgtgtgttgagagcttctcagactatctacctttgggtcgctttgctgttcgtgatatgagacagacagttgcggtgggtgtcatcaaagcagtggacaagaaggctgctggagctggcaaggtcaccaagtctgcccagaaagctcagaaggctaaatgaatattatccctaatacctgccaccccactcttaatcagtggtggaagaacggtctcagaactgtttgtttcaattggccatttaagtttagtagtaaaagactggttaatgataacaatgcatcgtaaaaccttcagaaggaaaggagaatgttttgtggaccactttggttttcttttttgcgtgtggcagttttaagttattagtttttaaaatcagtactttntaatggaaacaacttgaccaaaa

SEQ ID NO: 36363 - DNA, 421 bp, Homo sapiens
ttagaacaaagttaaacccccgtaatcttaaagagaaaatctttggaggttttaattaaacattttatacatttaaagtcttgttaatggtgctttaagtgtcaatgtagcatgtaaaaggctttgtacagacaggtaaaagttccatttctgagtgatgaaatgtaacacttcttcatctttaacttgaaatcaaaactatcagattttatttttgtataatttaaggaaggtaaagttaggggactagaagactctaaattggcttctacagatcaataatttaaatgtaactagttgggattttatagataaaattatatttgcgtatataacataactaatctgtaaattgtaataaatatatttgcaattattaaaaaaaaaaaaaaggggcggccgttctataggatccctcaag

SEQ ID NO: 36364 - DNA, 398 bp, Homo sapiens
cagagtttgaagaggaaaaaaacaccagccttggaaccagcagatctgcattagagtttatattatagtttcctaggactgctgtaacaaagtgtaccacaaacttgattaagcatgttaaaagtttttaagctcttaaaaacagaaattaaaacagaaatttgttttctatcacttctggagaaatcagggtatcggcagagccatgctccctctgaattttctagaggagggtccttccttggcttttccagcttttggtagccccattcgttccatagtttgcatctgtagccatttagtctctacctgtcaacatggcattctctctatgggtctctacctccacgtgcctctccttataaggacactggtcatcaaattagggtcactccaaa

SEQ ID NO: 36365 - DNA, 422 bp, Homo sapiens
  misc_feature (1)...(422): n = A,T,C or G
cttgaatttgcctaaacccacgaagaataacagtatttgctatctggccctttaagaagtttgccaacctaggctggtctaaataatgaaaattttacattaatgaaagtattttcatggatagtattccttttgttcttagaatatttctttgaggtaggcagaatgtatgttttattccagaattactgttttacgcagttttaacttgacaaacaaggcaaataatgctcaagagaagttgctatttagtaagcagcaaaataataactctgttgttttcccccgaagtacaaccaaatttaaatactgagtgaggaagcagtaaatatccaatgatatcttgagtttcttaagaatatcaatttagggttttaaaatgttttaaatattttacaaaaaagtactgaaacaactttgtn

SEQ ID NO: 36366 - DNA, 406 bp, Homo sapiens
cggcgggtcccggccgggcagacccaagtgccggcggcggagactgcagtggagccagtaccggctgtagtggccggggccgtggcgggagagtcatgtcagagccgcagccgcggggcgcagagcgcgatctctaccgggacacgtgggtgcgatacctgggctatgccaatgaggtgggcgaggctttccgctctcttgtgccagcggcggtggtgtggctgagctatggcgtggccagctcctacgtgctggcggatgccattgacaaaggcaagaaggctggagaggctctagcctctgtggccattccgggcttcaccatcaaccgcgtgtgtgctgcctctctctatgtcctgggcactgccacccgctggcccctggctgtccgcaagtggaccaccac

SEQ ID NO: 36367 - DNA, 400 bp, Homo sapiens
cccacgcgtccgggcaggagttcaggaccagctcattgaaaagagggagccaggaagtgggacggaaagtgacacttctccagacttccacaatcaggaaaatgagcccagccaggaggaccctgaggatctggatggatctgtgcagggagtgaaacctcagaaggctgcttcttctacttcctcagggagtcaccacagcagccataaaaagcgaaagaataaaaaccggcacaggtatgtatattaggttaggctgggaagttttttttaaaaacagaaaaacgtgatggaggattgatctgaagttaaacaaaaaaccacgagctgactattagaagacacattagtgcagaagcttccaggctgtagagccctgcttcccttctctgacctcaca

SEQ ID NO: 36368 - DNA, 379 bp, Homo sapiens
aggattgaaaatgtccaggaaagtggccaagaagcagtggccttattgcatcccaaaccacgcctcttgaccaggctgcctcccttgtggcagcaacggcacagctaattctactcacagtgcttttaagtgaaaatggtcgagaaagaggcaccgggaagccgtcctggcgcctggcagtccgtgggacgggatggttctggctgtttgagattctcaaaggagcgagcatgtcgtggacacacacagactatttttagattttcttttgccttttgcaaccaggaacagcaaatgcaaaaactctttgagagggtaggagggtgggaaggaaacaaccatgtcatttcagaagttagattgtatatattataataac

SEQ ID NO: 36369 - DNA, 431 bp, Homo sapiens
  misc_feature (1)...(431): n = A,T,C or G
cggatcctttgcagcagtgcttcaaaaaagatgaaattttagatgggcagaaatcaggcgaccatctaaagcggggtaggaagaaagggagaaacagacaggaagttcctgcatttactgaacctgacacgactgcagaggttaaaacaccttttgatttggccaaggcacaagagaacagcaactccgtaaagaagaagacaaagtttgtcaatttatacacaagagagggacaggacaggcttgcagtcctgctccctggtcgtcacccttgtgattgcctgggccagaagcacaagctcatcaataactgtctgatctgtgggcgcattgtctgtgaacaagaaggctcaggcccttgcttattctgtggcactctgggtgtgncnnannnnnnnnnnnnanntnnnncnnnnnnnantnnnnnnncn

SEQ ID NO: 36370 - DNA, 415 bp, Homo sapiens
aaaaaataaagcctttaatacatctagaatagattaacaattatactgactgggctgggggcatgtcagggaaactttggacccaccctaaaaaaaccttgaagggccactccctaaaaaatttacccaccaaattaaagatggggctgctaatttatacccccccgttttaccggaaaataaccttccttgagtttacgtttcttttataaaggcaggggatttgaatattttcatttattgccgccccgggcacataacatttatttattaattcccagtttcctttctttgtaggcacaggggaaaaaaaacatatggcctgaacctaacagttaggggctttaacaaaaaaaatctttcccctttcaaaaataaatgtttttttttgaaaaaaagacatacttgcttttat

SEQ ID NO: 36371 - DNA, 480 bp, Homo sapiens
  misc_feature (1)...(480): n = A,T,C or G
cggggtnnnnntttgacgccgtcgaacnccctccgaannnccgggncgacccacgcgtgcggacctccccaagaagcccccgccgcctgaggtcactgacctccccattaagcccccgccgcctgaggtcactgacctccccaagaagcccccgccgcctgaggtcactgacctccccaagaagcccccgccgcctgaggtcactgacctccccaagaagccgtccaaactggagttgagtgacctctccaagaagttcccacagctgggggccactccgtttccaaggaagcccctgcagcctgaggtcggtgaggcccctttgaaggcctcgctgccggagcctggtgcgccggcccggaaacccctgcagcccgacgaactcagtcaccccgccagacccccctccgaacccaaatccggcgcattccccaggaagctctggcaacccgaggccggtgaggctaccccgaggtcccn

SEQ ID NO: 36372 - DNA, 412 bp, Homo sapiens
cccacgcgtccgcccacgcgtccgcccacgcgtccgcccacgcgtccgcccacgcgtccgacacaactgtgttcactagcaacctcaaacagacaccatggtgcacctgactcctgaggagaagtctgccgttactgccctgtggggcaaggtgaacgtggatgaagttggtggtgaggccctgggcaggctgctggtggtctacccttggacccagaggttctttgagtcctttggggatctgtccactcctgatgctgttatgggcaaccctaaggtgaaggctcatggcaagaaagtgctcggtgcctttagtgatggcctggctcacctggacaacctcaagggcacctttgccacactgagtgagctgcactgtgacaagctgcacgtggatcctgagaacttcagg

SEQ ID NO: 36373 - DNA, 477 bp, Homo sapiens
  misc_feature (1)...(477): n = A,T,C or G
cgggcgttttnaaatgatncatgcgactgagactataagananggcncgacccacgcgtncgaatttatccttgagatacttgatgagtgtatataagcagttgcaatttagcatacaaaacctgacaaatggtaaataaaagaatatgtttatccaaatgatgaaatatttgtagtaaaaagtgctattcaattgccaggaaattaaaatactccagtaaaatgaattaaattagcatgttaataagagtgataatatttaaaagttttagtcaatcttgcatttccatacttgcattatctaaactagttgaacttttcagtgttttacttgatatattgcattcttgagcattaggcttctaggtgatttgttaaactcatagcaggttttagtacacagtgctgtttatgacagagaaaattttatcctacctctgaaataattgtactttctgtgattcagataaaaacttg

SEQ ID NO: 36374 - DNA, 488 bp, Homo sapiens
ggtggcactgatcactgacggacctgcgcacggaaccccgggtcgacccacgcgtccgcccacgcgtccgcggacgcgtgggtgagatatgatttcctagagatgtaaaaataagaatgactgtggcgcccccttcttccagatgaaatagaaagctctgccctatcacaaggggggtgttgaagcgccccttgtgtcttaactgtatttaactgagcacaagatgcacaagctgtggtgggaaaccctcagtttacctttggagacttacctgcagatcgcacacctgtttccaggctgatgtttctggtgtgaaattgctagcggtactgaagggttgtcccaattgttttagccgtgtgaaggattcttaattataacttgcctttcaacgatggcacatgacttgattcaacgtttgggtctgaacttacacactgatgcgtttactcatctaacataatctgacagggcctcagcaagggagg

SEQ ID NO: 36375 - DNA, 426 bp, Homo sapiens
  misc_feature (1)...(426): n = A,T,C or G
cacagactctgtcagtgccactctctgctcacatgcgttacgggttgattggtacatggggatggagtctcatgctgccctaagctgagagctttactcccaattcactcccttccctcgcagtgactttctcattctccctgggtacatcgacttcactgcagaccaggtggtgagtatgatcaggaattgggtcctgaacatcaaggtgagctaaggtgctactatcacctggtctctgggctaactcaccagattgggcttgggggtggattttataggatcatgttgcttgctagcatgcaggtcatacaaaagtgcctttttgtgggggactcagtaacaccttgaggtgtaagggatgctttcccacactggttgacgtttgtctcctcaggacctgacttctgctctgaccaagaaaan

SEQ ID NO: 36376 - DNA, 403 bp, Homo sapiens
cggacgcgtgggatgatggtgaaggatctcaacaagaagaagtgatttcctctgaagatattggagctagcattttcaatggacagaagaaggtgctgtattatgctgatgcccttacagaaattgcttttgtggttccttctcctgtggagtccttaactgattcattggaaagtaacatctcggaccaagatagtgattcaaatatggatcttatgccaggaattctgaaacagccatccctgacacttgagcttttccccaatcatacagacaatcttaattcctcacagaggctcagtcccagttccagaatgaggaagctgcctcagggtcgccctgttcctccccttggacctgagacaagagtttctgtagtctgggcggaacgctatgatgatat

SEQ ID NO: 36377 - DNA, 404 bp, Homo sapiens
tgcagaaggccttggctccttgaacttttggccgccatgtgcttcccgaaggtcctctctgatgacatgaagaagctgaaggcccgaatgcaccaggccatagaaagattttatgataaaatgcaaaatgcagaatcaggacgtggacaggtgatgtcgagcctggcagagctggaggacgacttcaaagagggctacctggagacagtggcggcttattatgaggagcagcacccagagctcactcctctacttgaaaaagaaagagatggattacggtgccgaggcaacagatcccctgtcccggatgttgaggatcccgcaaccgaggagcctggggagagcttttgtgacaaggtcatgagatggttccaggccatgctgcagcggctgcagacctggtg

SEQ ID NO: 36378 - DNA, 456 bp, Homo sapiens
  misc_feature (1)...(456): n = A,T,C or G
ttacagttgcatcaggcctgaacccgtccattcagaaagcttcaaattatagaaacaatactgttctatacgagtgaccgattatgctttctttggcctacattctttattctgcggtgaagttgaggcttataagttaaaacaaaggaactaacttactgtccaccagtttatacagaactcacagtacctatgacttttttaaactaagatctgttaaaaaagaaatctgtttcaacagatgaccgtgtacaataccgtgtggtgaaaatgaattcagacttattaaatgatgaacttgttaaatcttctcagtgtctatttatcagcacaatacacacaggagaactgttgatggcatattgaatagattttcctgaataaattgctctggaaaccncnnnnnnnnnnnnnnnnnnnnnnnnnnnnnnnnnnnnnnnnnggggggggggcctc

SEQ ID NO: 36379 - DNA, 409 bp, Homo sapiens
taggaactataataacaggcttaaaattaaaatttgttctgtttgttgggtcacacgtgtaatcccaatactttgggaggctaagccgggacgatcacttgagctcagaagtttgagactagcctgggcaacatagttcctatatacctacaatttttaaattaatggaaatggctttcagggcaagggtcaccatggcagccaccttggttaggcttgggctcttgtctgtcaagcaggttcaggttcaattctacccctttgagaagtagagatgatgaggaccttcctctagatgatgagtaatgagaaggtccactccaccaatctcaactgctcagctattgtggacatgaggtggacatgcagcataatgacttcgagccctgtgtggacatgctgttcagag

SEQ ID NO: 36380 - DNA, 457 bp, Homo sapiens
  misc_feature (1)...(457): n = A,T,C or G
cggacgcgtgggttaattttggcatttgactcttaagattatgtaacctagctactttgggatggtcttagaatatttttctgataacttgttccttttcctgactcctccttgcaaacaaaatgatagttgacactttatcctgatttttttcttctttttggtttatgtctattctaattaaatatgtataaataaagttacattttagtctgtcaaaaaaaaaaaaaaaaaaaaaaaaaaaaaaaaaaaaaaangggggggccccttttaaaaaattcctgggggggcccaaattttcgggggggggggaaatttttttttttttttttaagggggggcataaaaaacccccccggggttttttggaaaaaaccctttttttggggggggggaatttggggccccccccccccaaaaaatttaggggtttgggggaaaaaaaaaattttttggg

SEQ ID NO: 36381 - DNA, 495 bp, Homo sapiens
  misc_feature (1)...(495): n = A,T,C or G
acgtgccactgatnacatgantatcatncggacggaacncccgggncgacccacgcgtccgctttccttcaagggcctagagtatatntctgaaaatttatggaatgagtgaagaaatcttaatactttccttccttaacatacaacatgagtcccgagaataattgatagtagcaagagaaaactatgtcagtaacatgttgctttgtataaaaatcttatttataaatgcgaagctttttgatgccatcaaaacttattaaaaaataggatctacttttttctaattctgacctaagaaaaataatgagaacaagctgttgcaagctcttttgtagcctattgaatattttatagatattcaaaatttcctacaaactataattttttccatgatttagcagagagtgattatctagctttggctcttattaggtattggagatagtagcgtgctatcgatatcagcttttgagatggcattgtggtcatcag

SEQ ID NO: 36382 - DNA, 415 bp, Homo sapiens
cggacgcgtgggaaacgaaggctgacttgattgtgccatttagagggaactcttggtacctggaaatgtgaatctggaatattacctgtgtcatcaaagtagtgatggattcagtactcctcaaccactctcctaatgattggaacaaaagcaaacaaaaaagaaatctctctataaaatgaataaaatgtttaagaaaagagaaagagaaaaggaattaattcagtgaaggatgattttgctcctagttttggagtttgaatttctgccaggattgaattattttgaaatctcctgtctttttaaactttttcaaaataggtctctaaggaaaaccagcagaacattagcctgtgcaaaaccatctgtttggggagcacactcttccattatgcttggcacatagatctccctg

SEQ ID NO: 36383 - DNA, 406 bp, Homo sapiens
cggacgcgtgggaaaaactgaacattgattatttttaccctaacaacactacctgaggtactgtcagaatctccatccagaggagggtcaagaacaagggaataaaagaaaagcaacacctctatttgatagcagcattcttcacaacagccaagaggtggaagcaacccagtgtccaccatggatgaatggataagcaaaacgtgtcatgtacatacagtggcatgttactcagccttaaaaaagaagaaaactctggggtgggcacagtggctcatgtctgtaatctcagcactttgggaggccaaggcgggtggatcacctgaggtcaggagctcgagaccagtctggccaacatggcaaaaccccatctctaataaaaatacaaaaattagactctacctca

SEQ ID NO: 36384 - DNA, 425 bp, Homo sapiens
  misc_feature (1)...(425): n = A,T,C or G
aaaagacaccaaaatcaaaagacaaagaaggtcaccataagataataaaggggtcaattcagcgagaggatacaacaattggaaatatatatggacctaatactggagcactcaaatgtataaaggaattatagctaaaactaaagagagagctaggccccaatacaataatagctggcgacattaacacctcactttcagcattggacggttcttccagacagtaaatcaacaaagaaacatcagacataatctgtactatagacctaatggatttaattgatatgtacgaacatttcatcaacgagctgcagaatacacattcctttcctcagcatatgaattattgtcaaggaaagacaatatgttaggtcacaaaacaagccttataaaaaaaaannnnnnnnaaaaaaaaaaaggaaaaa

SEQ ID NO: 36385 - DNA, 436 bp, Homo sapiens
gaagacacccgtggagtgtggcatcggcttcaccatcatcctcagcgggctgcccgtctacttcttcggggtctggtggaaaaacaagcccaagtggctcctccagggcatctgtgagtatctcgctggcccacagcccgtggtaccctctgccctgggcagcgaagggagttgagaggcgtcggccgtctccacccacatggggcgaagcgtgttgggtggcaggagggttcaggtcactgcagtgtccgccagtgacacgcagcccacatggttcagggataagacacacagcgcagcaccagctaatctctcaggacgagggattccggaaaaccaggctactgctgccaagtaacaaaatcctgctggctgccaccagcggacacagcagacttacccagaaaggcagaaagaggcagaggcaggcggatca

SEQ ID NO: 36386 - DNA, 430 bp, Homo sapiens
  misc_feature (1)...(430): n = A,T,C or G
aaactgccaagctgcgcaccacaaaggagtgtactggactacagccttgtgttatggtcaaatcgatacccttaataagaaaggaaaggaaaggaaaacagatcctcccctctgctttttattgtaaccagaatcaccctgaggtcccttctgaaccctctgggcctgcgctaattgtaggagccacagcgctcctagggtgagaggcttatccatccctgaccctggcagtgcactggtaagcagacactgcactgaaccaactgctatgctcagaatgtaccagaaacccaaacattggcaagtaattttgcaactttcaagtgcgttctttagaccaatggcattggtttctttccctgcttttgagatagtaggaagagttcttggtgagagccccccccttcaattcttcagttgtatagtagnt

SEQ ID NO: 36387 - DNA, 391 bp, Homo sapiens
  misc_feature (1)...(391): n = A,T,C or G
caaaattgccacggccgaggaggagctcatcatttcccagaaggtgtttgaggagatgaatgtggatctgcaggaggagctgccgtccctgtggaacagccgcgtaggtttctacgtcaacacgttccagagcatcgcgggcctggaggaaaacttccacaaggagatgagcaagctcaaccagaacctcaatgatgtgctggtcggcctggagaagcaacacgggagcaacaccttcacggtcaaggcccagcccagtgacaacgcgcctgcaaaagggaacaagagcccttcgcctccagatggctcccctgccgccacccccgagatcagagtcaaccacgagccagagccggctggcggggccacgcccggggccaccctccccaan

SEQ ID NO: 36388 - DNA, 460 bp, Homo sapiens
  misc_feature (1)...(460): n = A,T,C or G
cccacgcgtccgcccacgcgtncgtggacgcgtgggcgcggacgtaagggctgaagatttttggtccgcacgctcctggtgctgactcaccgctgttcgctctcgccgaggaacaagtcggtcatgaagcccgcgcgcaacagccatggtgaggcggcagtcggcggcgggcggcgcaacgcagggctcgggcgccggggggaccccggtttcaagatcgtgctcctgatggcagatgccgagcgtgtangggcggaaaggcgctcctgaaatgggggggaaacgcgggaagcttccggaagctgcctttctccagaagtggcagaccatttttggcttattgttctttgtcatgtatctaataataggcttttaaggataccggaaaacacccgtggagccggaggtggcaattcaccagattcgaatcaccctaacaagccgcaacgtataatccttg

SEQ ID NO: 36389 - DNA, 420 bp, Homo sapiens
catgcacctatctcttgctgaattgctttaatagaataatgagagcaagtttgtctaactaataccaacctgacaacttgaataacaataaatgcaatttgtacataaaatataatgctgcaaaagtttgtcattcacctcagtggagtgacttgatattagatggtaaccgtagatgatggttaatatgaaaatggacaggaaagaagcattttctgaaagttatattcttttgaaccacgttctaaaccaagtttttaatcttcttggggctcgtaattacctttcactttaatgtcacttaaagatataacacagaaaaatgccttgagggcaaaatataggcaaaacaccaatgcgctttcaaatgcatgaaaatggggcagttgtacccttgagccttgactcaagggctggagt

SEQ ID NO: 36390 - DNA, 425 bp, Homo sapiens
agtgctatagtcgcgccaccagcatcttcccctcgggctggagtgtggccgccatggccaaccagtctggctggagtgatgcattcctggcccagcacacgatgcttaccctggatcccaacgtcaccggtgtcttcctgggaccctacccctttggcatcgatcctatttggagcctggctgccaaccacttgagcttcctcaactccttcaagatgaagatgtccgtcatcctgggcgtcgtgcacatggcctttggggtggtcctcggagtcttcaaccacgtgcactttggccagaggcaccggctgctgctggagacgctgccggagctcaccttcctgctgggactcttcgggtacctcgggatcctagtcatctacaagtggctgtgtgtctgggctgacacggccgcctcgtgcccc

SEQ ID NO: 36391 - DNA, 407 bp, Homo sapiens
  misc_feature (1)...(407): n = A,T,C or G
ctttcaatgttccacactccccggccagagcctcctttgcttctttttttccctccccccccttaccgcccgcacagttggctccatttccttaaggaaggggttttttgtctctccctcccccacaccgaancggcgcccgagcgggccgagcgggcgaccgaattttccaacagataacttcaccaagatgtccattgataggcaaaggtccgatgaggagagccccaacaccagcagtggcagttcagatgcggaccagggagacccagccgctccagagcctgaagaacaagaggaaagaaaaccttctgccacccaccgaaagaaaaacaccaaactctttagcaaaaccactgctaagttatccactagtgctaaaagaactcagagggagctagctgagg

SEQ ID NO: 36392 - DNA, 408 bp, Homo sapiens
cggacgcgtgggcggacgcgtggggtgaaaatgttcttgcctcttacagaggagcagaggaaaaagattgaagagaatcgacaaaaggctctggcccgcagagctgagaagttattggcagaacagcatcagaggactagctcgggcacctccattgctggcaacccattccaggccaagcaaggcccatcccaaaatttcccaagggagtcttgtaagccagagagccatggtgtcattttcaagcaacagaatctcagtagctcatctaatgctgaccaaagacctcatgattcccacagttttcaggcgaagggaatatggaaaaagccagaagaaatgcccacagcctgcccaggccacagtccacgtagtcaaatggctctcactggaatctctcctcccttg

SEQ ID NO: 36393 - DNA, 408 bp, Homo sapiens
gccaaataagcgccggctatgcccctgaattggattgccacacggctcacattgcatgcaagtttgctgagctgaaggaaaagattgatcgccgctctggttaaaggctggaagatggccctaaattcttgaagtatgctgatgctgccattgtagatatgggtcctggcaagcccatgtgtgttgagagcttctcacactattcacctttgggtcgctttgctgttcgtgatatgagacagaccgttgcggcgggcgtcatcagagcgagggacaataacgctgctggagctggcaagggcaccaagtctgcccagagagctcagaatggttaaatgaatattatgcctaatacctgccaccccactcttaatcagtggaggaagaacggcctcagaactgtttgtg

SEQ ID NO: 36394 - DNA, 467 bp, Homo sapiens
tctcaggacattctcttttccacctcaccgtgaatgccctggctcaggaccgacactttcctttccaaagtctgctttcagctaactcttggaaggaaatctctcccatgtttcactcaaaggtataaatgcctgatgaggcattacagcaacttatgctgaagttagttttaggtgttgggcatggagatcctgtcacaccttacagggtagctggctgtctcttcccatctctcggtccagtgaacccttagaaaacaatgccaagagtctcctagtttgactctcgtttcttgctgctcttttatctcttatttgttaataaataattatataaataaatgcttttcctgtttctctttttggtgccaggacttccctaaagcctgttcgtgaaccattggtgactgaaccttggtcacttggtacgtgtccttcactgggctgggcagtcaagtatgagacac

SEQ ID NO: 36395 - DNA, 397 bp, Homo sapiens
caggatcatgggtagaagggacttgccttgtttcagatgagactttggactacggacttttggattaatgctgagatgagttaagactttgggggactgtttggaaggcatgattggttttgaaatgtgagaacatgagatttggaggggccaggggcagaatgatatggtttggctgtgcccccacccaaatctcaacttgaattgttatctcccagaattcccaggtgttgtgggagggacccagggggaggtaattgaatcatgggggccggtctttcccatgctatttttgtgatagtgaataagtctcaggagatctgatgggtttatcaggagtttctgcttttgtttctctctcattggctcttgccgctgccatataagaagtaccttt

SEQ ID NO: 36396 - DNA, 470 bp, Homo sapiens
  misc_feature (1)...(470): n = A,T,C or G
ngggcnnnnnnnnnaactgatagccgtggaaccgcntcgaatntccggtcgaccacgcgtccggatgtttgaaattgctgaggattgttttattttggattgcgtggtcaattttaaagtatgtgccacatggggctgagaagaatatatattatgttgtttttagatggagagttctgtagatttctagtagggctatttggttaagtattgagtttagttcttttttaatttgctgcctcaataatgtgtctaatagtgtctgtggggtgtcgtagtctcccactattgtatcagaatctaagtctcttcataaatctctaagaacttgccttattcatgtgcacctgtgaaaggaaattaaatcttgggacccacaactcattaagccaaacagaaaagttaagctgggaacggngtcacacaaacctgccttcctcttttggctctgttgacgaagagtcaaactn

SEQ ID NO: 36397 - DNA, 406 bp, Homo sapiens
ctgggaggtgcagtacggcatcctggccggggccctggtgtctctgctcatgctcctgcactctgcagccaggcctgagaccaaggtgtcagaggggccggttctggtcctgcagccggccagcggcctgtccttccctgccatggaggctctgcgggaggagatcctaagccgggccctggaagtgtccccgccacgctgcctggtcctggagtgcacccatgtctgcagcatcgactacactgtggtgctgggactcggcgagctcctccaggacttccagaagcagggcgtcgccctggcctttgtgggcctgcaggtccccgttctccgtgtcctgctgtcccgctgacctgaggggttccagtacttctctaccctggaagaagcagagaagcacctgagg

SEQ ID NO: 36398 - DNA, 414 bp, Homo sapiens
tgaacctacatgttaaattccattttgatgttaaaaatatatttaaatttttcattggaatagaactaaaataaattgtgccaatgaattgttgaaatgctttattattttatttctgacatttttaattttataatatttcaagagtcagtaacctaaagtttggcactactttattgctagtatcaaataccgttgtccagccatatgtggtactctttcctttgttttataatctacctttatacaggttttctgcctcttcagggcttaactttcttgcattatttagatcatgtaatacagtcgttaacaggccaatgaatgtttttctttataagcaagctgtactcagaaatagctctgaaaactggttacccaataatttataaatattcgaatcatgctagcaga

SEQ ID NO: 36399 - DNA, 405 bp, Homo sapiens
cggacgcgtgggcggacgcgtgggcggacgcgtggggccagacagctctcttttggttcccattccaaatgtgctgctgtccttctttgcatttcacaatatcaaagaaaccaccacccttcttcctaacagcattttatgccttttattccacattaaatgggaattgtgcctacttaggagtgcccctccaattaattacatgtgtccaagaataatccaagctagagacacaaggtgggaaaacatttcaaaaaaaaaaagtccttttaaggccagtaatttatctgaaaaggtattttatcacaccttgacaccttatatatgagcctattaggagctgcaggtggtttcatagggtaaaatccaaaaaaagagaaggatgtgtggggtttctattataag

SEQ ID NO: 36400 - DNA, 417 bp, Homo sapiens
  misc_feature (1)...(417): n = A,T,C or G
cccacgcgtccggaattatataattctaacgcttaaatcatgtgaaagggttgctgctgtcagccttgcccactgtgacttcaaacccaaggaggaactcttgatcaagatgcccaaccctgtgatcagaacctccaaatactgccatgagaaactagagggcaggtcttcataaaagccctttgaacccccttcctgccctgtgttaggagatagggatattggcccctcactgcagctgccagcacttggtcagtcactctcagccatagcactttgttcactgtcctgtgtcagagcactgagctccacccttttctgagagttattacagccagaaagtgtgggctgaagatggttggnttcatgtttttggattatgtatctttttgtatgggaaagactatattttgtact

SEQ ID NO: 36401 - DNA, 405 bp, Homo sapiens
cccacgcgtccgaaaccatttaattcaaatgaacccatcaactggatgccaactctggcgaatgtaggacctctgagtggctgtataattgttaattcaaatgaaattcatttaaacagttgacaaactgtcattcaacaattagctccaggaaataacagttatttcatcataaaacagtcccttcaaacacacaattgttctgctgaagagttgtcatcaacaatccaatgctcacctattcagttgctctgtggtcagtgtggctgcataacagtggattccatgaaaggagtcattttagtgatgagctgccagtccattcccaggccaggctgtcgctggccatccattcagtcgattcagtcataggcgaatctgttctgcccgaggcttgtggtcaag

SEQ ID NO: 36402 - DNA, 401 bp, Homo sapiens
tctccagaacggccgcatgagcatcaaagcctacgtcagcactttaatgggagtccctgggaggaccatgggagtgatgttcacgcctctgacagtgaaatacgcgtactacgacactgaacgcatcggagttgacctgatcatgaagacctgctttagccccaacagagtgattggactctcaagtgacttgcagcaagtaggaggggcatcagctcgcatccaggatgccctgagtacagtgttgcaatatgcacaggatgtactgtctggaaaggtgtcagctgacaatactgagggccgcttcctgatgagcctggttaaccaagtaccgaaaatagttcccgatgactttgagaccatgctcaacagcaacatcaatgaccttttgatggtgacct

SEQ ID NO: 36403 - DNA, 473 bp, Homo sapiens
  misc_feature (1)...(473): n = A,T,C or G
ggggaggnngnnnnnaactgaaaccnactgagtggctgcggaangcncgngaatncgggtcgacccacgcgtccgcttctgactcagtttcacagaccaacattcaaaatttgaaaggcttaaattctccagttcttattgggaagtcaaaagatccatcctgtgttgcaaaagtttctgaagaggggaaacctgtgatagggactcagaaaatggagttacatgtgaggtggaggtcagacacaggcaaatgtgtagatgcttcaccgctggttgtaatacccacttttgataagtcatctacaactgtgtacattggttcccattctcatagaatgaaggcagttgacttttactctgggaaggtaaaatgggaacagattttgggagatcgaattgaatcctcagcatgtgtatctaagtgtggaaactttattgtggtgggctgttataatggattagtttatgttctg

SEQ ID NO: 36404 - DNA, 406 bp, Homo sapiens
cggacgcgtgggtcgacccacgcgtccgcggacgcgttggcctgtagggtccccccaaggccaagaatggggctgggagccatgcatggcgagactggagtgtgagcttgaggacagcatgaattagacgaccacctctggctgtcagggtgtggcttatactatctgaccctcacgctgagctgtacagatgccatcaccttccaaacacagtcacgaggccttaggaacgtttccagagctttcgttattattcgggtctcctcgacagctgctgcctggtgagggctattccagatgacaagcctgaatgccgtcatcaaggctgaggaggccggccccacgcgccacccactatattgcctgcaggccgtgaggcttctcttttgtcttcagccacatgtga

SEQ ID NO: 36405 - DNA, 429 bp, Homo sapiens
cccacgcgtccgctcttgctccttcgtgcaattcctgatttcattactctcttctgccaggaaataagcagggagcataggcttcttgcaagaatggagtgcgaagatgggctttgtttggcttaggaaatgccatacattttggaggtttttgtcttttctaagttttgattattttatcactgaatctgcagggctttcctgatcctttcgggattgctctctcagaactgtgaattctttcaaagggatttgtggattgtggcaaggagagcattccaaaatgcctgaggcaaattatttgttatctgtatcttggggttacatcaaggtgggttaatttgattgtgttctgtgtctttgataaaatgtgaaacgtacctctgtgtgtttttttgtgaagtacaggacatctggaataaattgatt

SEQ ID NO: 36406 - DNA, 380 bp, Homo sapiens
  misc_feature (1)...(380): n = A,T,C or G
caggtttatagagatgtatatagaattatagtccttatttttttcctttgcgtgaaaccttttataacagattaacaatcaactgcataaatattattaatattttaaaaagagttaagttgtattttgataattcacaaactatcatgcaaataacgagtaagtagacaagaataaagtggtttgagatgaaaagaacctaacattatttacagtagatgtggttttaatacaattactgccctaaaatgtctctggcaatgtacagaaatattgtatatacttacatatgtaattgttgtaagagttaaatacaaaatcatggtgacacttccaattaagtgcactaaatgaaaagttaagtcacttattaacttttn

SEQ ID NO: 36407 - DNA, 414 bp, Homo sapiens
aaaatcactttaatggcttttgatacatcatataacaaactgctcccaccccctccaacccccagaactgttagcacgaatcaagttcccttacagttttgccagcactgggtatttgttaatatttttccatttgttaacttaaagtttagtttttcttttgtgtgaattgatgtattcatgtcctctaaccacttatttatgcttttgtgctaataaaaaaagccaacactagtttcattagccactgataccctctttaggaggtgaacttacttgtaagtttttacttcctctgcagccgaaactgccttttcatctgcagctgacagcctgtgctctctttcttgccgttcatactcttcttgactcagtttcctaagataaaactggttgtcaatgaaagtgtttctt

SEQ ID NO: 36408 - DNA, 418 bp, Homo sapiens
cagtcatccccaaattatgtttttggctgtgcattctattttctacatagcactgaatctgagtaacagtcatcctggatttatagttggaacagaacagtaacagacctaactgggactcagccagcactagcctcatcttagctgccccttttctctgctttgcagtttactgcttccctgggctagccataacggggttctgggcaggtcagactcttcagcaagacagtgtattaatagtgtgaattagatacactgatgacctgctctgcctagttaagaaactgaattaatcagcagttacaaagcacatactttgttacgtgctaggctttgcctcctggcctctagataattaagacggcccagggaataccagcagagaagtgctaattgtatttgggtttacaaaagc

SEQ ID NO: 36409 - DNA, 411 bp, Homo sapiens
cccacgcgtccgtgggctggcgcggaggaggcgatgactcggctggtcaacattctgatcctgtcagtcagggatgcacgagactggttgatgaaaacagagacccgcttaaagaaggaaggtattgttcaggaagatgattatgaaaatgaagttgaagactttggtgagcttcggcctagaaggcgttctcggaaatgtggaaagcagagaaaatactaatgtccacacagctgcagcctcctcatccttcggaacattccattctgacttagaattctgagcgctggggcagaagacaaaaagaatgtgaattagcattttaaaaataggggagtctaacaacaccattgctttttattctcattacttctctttcagtggcttaggatctgattgctccctcacctc

SEQ ID NO: 36410 - DNA, 415 bp, Homo sapiens
acgttagtcgtgagctcttgtgaggaaagtcattggctttatcctctttagagttagactgttggggtgggtataaaagatggggtctgtaaaatctttctttcttagaaatttatttcctagttctgtagaaatggttgtattagatgttctctatcatttaataatatacttgtggactaaaagatataagtgctgtataaaatcagccaattatgttaaactagcatatctgcctttattgtgtttgtcattagcctgagtagaaaggcctttaaaatttttttagaaagcatttgaatgcattttgtttggtattgtatttattcaataaagtatttaattagtgctaagtgtgaactggaccctgttgctaagccccagcaagcaatcctaggtagggtttaatccccaa

SEQ ID NO: 36411 - DNA, 418 bp, Homo sapiens
tgcggcatcgccggcctcgctatgtctgccattttcaattttcagagtctattgactgtaatcttgctgcttatatgtacctgtgcttatattcgatccttggcacccagcctcctggacagaaataaaactggattgttgggtatattttggaagtgtgccagaattggtgaacggaagagtccttatgttgcagtatgctgtatagtaatggccttcagcatcctcttcatacagtagctggggaaaatgccagaatgtagttgccatcagatttgattgtgaacaaggactgactgcagaaaataatggaaaggatgtttaactcttttatctccgaacattgaatgagataaatttccagatgctgttctctattttaatggtattggaccaatgttctgtataaacaattaag

SEQ ID NO: 36412 - DNA, 399 bp, Homo sapiens
  misc_feature (1)...(399): n = A,T,C or G
cggcccctgccccgcgcccagggatcctccagctcctttcgcccgcgccctccgttcgctccggacaccatggacaagttttggtggcacgcagcctggggactctgcctcgtgccgctgagcctggcgcagatcgatttgaatataacctgccgctttgcaggtgtattccacgtggagaaaaatggtcgctacagcatctctcggacggaggccgctgacctctgcaaggctttcaatagcaccttgcccacaatggcccagatggagaaagctctgagcatcggatttgagacctgcaggtatgggttcatagaagggcacgtggtgattccccggatccaccccaactccatctgtgcagcaaacaacacaggggtgtacatcctcacatccacn

SEQ ID NO: 36413 - DNA, 413 bp, Homo sapiens
aacattatatagtgatagaagggtcaattcatcaaaaggatataacaattgtaaatctatacatatccaacattggagcacctggatatataaaacaaatattaaaggttgaagggagagatatgttgcaatgcagtaatatcagggaatttcaacatctcacttttaaaaatggatagattatccagaaagaaaattaataagaaaacgttgaacttgaccaacactttagatcaaatagacctaatggatacatacagaacatttcatctcaagcacacaagaaacattctccaagatagatcatattttagcccacaaaacaagtcttagcaaatttaagaagactgaaatcgcttcatcgtatcaagtatcttttctgaccacaatactatgaaaactagaaatgagta

SEQ ID NO: 36414 - DNA, 415 bp, Homo sapiens
  misc_feature (1)...(415): n = A,T,C or G
cccacgcgtccgcaagcttcattgttttcagctaacagtaaccccagatgagggttactaccagggtggaaaatttcagtttgaaactgaagttcccgatgcgtacaacatggtgcctcccaaagtgaaatgcctgaccaagatctggcaccccaacatcacagagacaggggaaatatgtctgagtttattgagagaacattcaattgatggcactggctgggctcccacaagaacattaaaggatgtcgtttggggattaaactctttgtttactgatcttttgaattttgatgatccactgaatattgaagctgcagaacatcatttgcgggacaaggaggacttccggaataaagtggatgactacatcaaacgttatgccagatgataaaaggggacgattgcaggcccn

SEQ ID NO: 36415 - DNA, 409 bp, Homo sapiens
  misc_feature (1)...(409): n = A,T,C or G
agaggagtaactaggggatctgattttagaggccttaattttctgttcatggactgttaaaagtaaaacgagactttcaaaagggataaacctaaatatttacttgttatcattagagagggaacatcaaatgctgggacatcattactaaccaatagcatcagacactggatttaatggataatcacaatggtcgtaatgtatacagacatatataccacgttctagtataaatttttcaaaaaatacaataataatataatttataaagaacactcttctatgaacaaccaccaccaccaaannaaaaaaaaaaaaaagaaaaaaaaaaaaaaaaaaaaaaaaaaaaaaaaaaaaaaaaaaaaaaaaaaaanaaaaaaannnnggggggggggggggccccccttct

SEQ ID NO: 36416 - DNA, 399 bp, Homo sapiens
cggacgcgtgggttctaagatcgcgagcggccacccttttttgttttttttaaaagatgtgtgaaatgttctctgcaaaataattcaggccactgtctccttttatatattattataattatttattatgaagaccagtgaattacgatatttaaagtgagagaacttaattatttgcaaaggtaagttacagcttgttttttgagagaatcaaatgagtttacttttgttcctgttgtttttaactagctttaagtttaaagatggaagctaagcaatggaaatgctatacgtttttgacatttattaaatggtaccaataaagtattttattaccaaaaaaaaaaaaaaggggcggccgttttaaaggatccttgggggggccaaagtttacgcgtg

SEQ ID NO: 36417 - DNA, 404 bp, Homo sapiens
cggacgcgtgggcggacgcgtgggcgggattttagacgccatcgcgaaggagggctgcagcggtttgctggaggaggtcttcctggacctggaggtgggcctggctctttcctcctgccgttttctgggccgaagcccagtgcttcctcactgccctctgggacacaggctgtgaactgtaccgtgcggatgccgtctggggagccgggctgtgcacttgcattccggtcagatcgcttaaagcgcctccgttttcggtgacgctgcttcgtatgatgcagggtccttcttacgcacaattcagtagattcaccctgtaagtattaaagacatcagacaatttagtggattacaaaatagaaaccgatatgtagggacctgtcaaaaagtcaaattgagagtgc

SEQ ID NO: 36418 - DNA, 405 bp, Homo sapiens
tgctggtttcatctttcatagcaggaatcacgtacagtctctaattaaaacatacatgaagctagaaaaaaaaatagcctctttattgttttccgtaattgtccttaattttaggagaaatcttacaagactagattctcttgtggggaaaaaagtatttaaattgagcattttttcagtttcacacttgttttccttttgttaatttgctatatttgttaaatatagcatatgagcccacttttgtaaaactatttgtatatatgtgcctgtatgattaagagagatggttggaatgaatgaagttcaccagatagtacttctttctggctgatgaacttttgaatgatttttaaactttgtacttttatataatgcttattttctttttacaataaacatgtg

SEQ ID NO: 36419 - DNA, 415 bp, Homo sapiens
cggacgcgtgggtttttctctatagtatctttactttttcagcattggtcccatgaagctaatggatgcggcagaactggtaaaacagcctccggatgtcactgaaaacccttacagaaaatctgggcaggaagcatccataggaaagcaaattcttgcccctgtggaagaatcagcctgtcagtttttctttgatttaaatgaaaagcagggaaggaagcgttcatccacaggtagagatagcaaatcttctcctcatccaaagcagcctcgcaaacctcctcagcctccaggaccctgctggttttgccttgctagccctgaagtggaaaaacatttggtggtcaacatcggcacacattgctaccttgccctggccaaaggaggcttatctgatgaccatgttctcatcctg

SEQ ID NO: 36420 - DNA, 286 bp, Homo sapiens
atcaaggcggagaggaagcgcatgaggaaccgcatcgctgcctccaagtgccgaaaaaggaagctggagagaatcgcccggctggaggaaaaagtgaaaaccttgaaagctcagaactcggagctggcgtccacggccaacatgctcagggaacaggtggcacagcttaaacagaaagtcatgaaccacgttaacagtgggtgccaactcatgctaacgcagcagttgcaaacattttgaagagagaccgtcgggggctgaggggcaacgaaaaaaaaaaaaaagg

SEQ ID NO: 36421 - DNA, 424 bp, Homo sapiens
tggacagatgtgttccagacactggtcatgttcctcgggcagctggcagttatcatcgtggggtcagccaaggtgggcggcttggggcgtgtgtgggccgtggcttcccagcacggccgcatctctgggtttgagctggatccagacccctttgtgcggcacaccttctggaccttggccttcgggggtgtcttcatgatgctctccttatacggggtgaaccaggctcaggtgcagcggtacctcagttcccgcacggagaaggctgctgtgctctcctgttatgcagagttccccttccagcaggtgtccctctgcgtgggctgcctcattggcctggtcatgttcgcgtattaccaggagtatcccatgagcattcagcaggctcaggcagccccagaccagttcgtcctgtactttgtgg

SEQ ID NO: 36422 - DNA, 457 bp, Homo sapiens
ccatcatgcccgagatagcggcgaggtccgctttcagagtatggttttccctgccaaacggttctgcttggtgccatccatggagggcgtgcgctgggccttttcctgcggcacttggctgccgagccgagccgaatggctgctggcagtgcgatcgattcagcccgaggagaaggagcgcattggccagttcgtctttgcccgggacgctaaggcagccatggctggtcagctgatgataaggaaattatttgcagagaaattgaatatcccttggaatcatattcgtttgcaaagaactgcgaaaggaaaaccagttcttgcaaaggactcatcgaatccttacccgaatttcaactttaacatctctcatcaaggagactatgcagggcttgctgctgaacctgagctgcaagatgcaattgatataatgaagactagttgtacacgtcgcggt

SEQ ID NO: 36423 - DNA, 408 bp, Homo sapiens
agaagtcatgtaggtccaaccatattatttctcatgtgagaaaacaggctaataacttccatgattaaacacattactagtgggagaactccagagttcttttctgactcccattggtgctccttctacaaggcaaggaatctttatattaggtttattctagcatgaccccttttaaggtttaaactggtgataaatatattatttgctcatgtcattcttcagtgctttgaagattttatagagaagaactcaggctcttttactgcattgagtcttaaaaggggggttgaattccgaagggatcaaataaatccaacgtagtagttgcatcagaaaccatattaggaaaaccctccttaaacggcaaaaggcagagatcagttccttgagtataaagtgttaggg

SEQ ID NO: 36424 - DNA, 434 bp, Homo sapiens
  misc_feature (1)...(434): n = A,T,C or G
attaattaaataagtcaattcctggaatgtgagagagcaaataaagacctgagaactttccagaaaaaaaaaaaaaaaaaaaagggggggccgttttaaaaaatccctgggggggcccaagtttacccgggattgcaaaggaaaaattttttccttatagggggccgttttataccctacctggggattttgggaaagaaacctttttttgggggggggacaaaatgggccaacctccttccggaaatttaagcctttagggcaaataaaaaattttaagggggaaaaggggtaaaccaaccgccttaggctccccgtttaaaagactggccnnnnnaaactccacatcacacttctccagaaggtatcattgccattcccccccccgcttttgagctttcaataaaattcaacaccccttcatgtaagaaatn

SEQ ID NO: 36425 - DNA, 420 bp, Homo sapiens
cggacgcgtgggtggtttgaacggctggaagcaatgaagctaaatgagcgtgtagaccacactccaaaactgaaactgtggatggcagccatgaaggaagatcccacagtctcagccctgcttactagtgagaaagactggcaaggtttcctagagctctacttacagaacagccctgaggcctgtgactatgggctctgaagggggcaggagtcagcaataatgctatgtctgatattttccttcactaatatgaataatagcatgcttttattttactataaaaaaacaaaaaaaaaaaaaaaaaaaaaaaaaaatatggggggggcccctttaaaaaacccccgggggggcccaaatttccggcgggcggggaagaaaaatttttttcctttatgggggccctttaaaaagccctcg

SEQ ID NO: 36426 - DNA, 424 bp, Homo sapiens
cccacgcgtccggggaggtgaacatcacaggggtggaagagaacaccctgattgccagcctttgtgatctcctggaaaggatctggagtcatggactacaagtgaaacaggggaaatcagccttatggtcccacctgttacattatcaggacaaccggcagagaaaactcacatcaggaagcctcagtacctcaggaatacttcttgattcagaacgtaggaagtctgatgccagctcactcatgcctcccctgaggatctccctgattcaggatatgaggcacatccagaacatcggggaaatcaagactgatgtgggaaaggccagagcatgggtgcgactgtccatggaaaaaagttactttccagacacctgaagcagctcctctcagaccatgagctcaccaaaaagttatataagcgc

SEQ ID NO: 36427 - DNA, 428 bp, Homo sapiens
  misc_feature (1)...(428): n = A,T,C or G
ctgccatggatacctggctcgtatgctgggcaatttttagtctcttgaaagcaggactcacagaacctgaagtcacccagactcccagccatcaggtcacacagatgggacaggaagtgatcttgcgctgtgtccccatctctaatcacttatacttctattggtacagacaaatcttggggcagaaagtcgagtttctggtttccttttataataatgaaatctcagagaagtctgaaatattcgatgatcaattctcagttgaaaggcctgatggatcaaatttcactctgaagatccggtccacaaagctggaggactcagccatgtacttctgtgccagcagtgaaagggggtctggggccaacgtcctgactttcggggccggcagcaggctgaccgtgctggaggacctgaaaaacgtgttn

SEQ ID NO: 36428 - DNA, 448 bp, Homo sapiens
cggacgcgtgggcgaactatttctctacgttttctcttgatcctcccgaaatcttccagatccgcgtagtgaggaatcgtctccaccgtcatggggggcggagacctgaatctgaagaagagctggcacccgcagaccctcaggaatgtggagaaagtgtggaaggccgagcagaagcatgaggctgagcggaagaagattgaggagcttcagcgggagctgcgagaagagagagcccgggaagagatgcagcgctatgcggaggatgttggggccgtcaagaaaaaagaagaaaagttggactggatgtaccagggtcctggtgggatggtgaaccgtgacgagtacctgctggggcgccccattgacaaatatgtttttgagaagatggaggagaaggaggcaggctgctcttctgaaacaggacttctcccaggctctatctttg

SEQ ID NO: 36429 - DNA, 470 bp, Homo sapiens
  misc_feature (1)...(470): n = A,T,C or G
cggggggnnnnnnttctgatccccgactgatcccctcgannccgnnngacacgcgtcgcacaggcgcagcccagcctcgaaatgcagaacgacgccggcgagttcgtggacctgtacgtgccgcggaaatgctccgctagcaatcgcatcatcggtgccaaggaccacgcatccatccaaatgaacgtggccgaggttgacaaggtcacaggcaggtttaatggccagtttaaaacttatgctatctgcggggccattcgtaggatggtgagtgtttccctgggctttgctcatcacttcgggacatcgtggactttaccgtgcgcattggagtgtgtgatggtgcctgagtagatctgctggcagagtagtttgagccagctggactgggctggccgcctgccgcttcttgagggtggaagaggggtgctctgagaagacactcaggcagcagactctgcctctcactg

SEQ ID NO: 36430 - DNA, 407 bp, Homo sapiens
  misc_feature (1)...(407): n = A,T,C or G
cccacgcgtncgcccacgcgtncggagcaacatgaagaccatgtctgccatctaccagaaggtgcggcatcggctgaacgacgactgggcatacggcaatgatcttgatgcccggccttgggacttccaggcagaggagtgtgcccttcgtgccaacattgaacgcttcaacgcccggcgctatgaccgggcccacagcaaccctgacttcctgccagtggacaactgcctgcagagtgtcctgggccaacgggtggacctccctgaggactttcagatgaactatgacctctggttagaaagggaggtcttctccaagcccatttcctgggaagagctgctgcagtgaggctgttggttaggggactgaaatggagagaaaagatgatctgaaggtacctgtggga

SEQ ID NO: 36431 - DNA, 482 bp, Homo sapiens
  misc_feature (1)...(482): n = A,T,C or G
cattgaacgctttcgttgacggccgtaatacccgcgncgacccacgcgtccgggggaaatgcccgcagagcccatgacgattgatgaactgtatgagctgttggtggatgccatctttggcttcagcttcaagggcgatgttcgggaaccgttccacagcatcctgagtgtcctgaagggactcactgtgcccattgccagcatcgacattccctcaggatgggacgtggagaagggaaatgctggagggatccagccagacttgctcatctccctcacagcccccaaaaaatctgcaacccagtttaccggtcgctaccattacctggggggtcgttttgtgccacctgctctggaaaagaagtaccagctgaacctgccaccctaccctgacactgagtgtgtctatcgtctgcagtgagggaaggtgggtgggtattctccccaataaagacttagagcccctctctttcagactgtgg

SEQ ID NO: 36432 - DNA, 420 bp, Homo sapiens
  misc_feature (1)...(420): n = A,T,C or G
cagtttgaaaaatgtggtttgcaggttctaaaggtggagaagatagacaatgaggtccttatggctgcctttcaaagaaagaagaaaatgatggaagaaaaactgcacaggcaacctgtgagccataggctgtttcagcaagtcccataccagttctgcaatgtggtatgcagagttggctttcaaagaatgtactcgacaccttgcgatccaaaatacggagctggcatatacttcaccaagaacctcaaaaacctggcagagaaggccaagaaaatctctgctgcagataagctgatctatgtgtttgaggctgaagtactcacaggcttcttctgccagggacatccgttaaatattgttcccccaccactgagtcctggagctatagatggtcatgacagtgtggttgacaatgtn

SEQ ID NO: 36433 - DNA, 430 bp, Homo sapiens
  misc_feature (1)...(430): n = A,T,C or G
aaatctgtaaaaatatgtgtaacacacatcttgaaatatttgtgttaggagaattaagtcttacacatttggttctttttctactgtttttgattatgttctctaggttactatgattatcttttgttaaaacagttcaggaaatattaatctcaaaacgaaatgtagccatattggacagagtagagaattgcttttccacagagaccagttattccaaaaaggtgaagatgtttctgaaataatatcatgctcatatgctccaaaagaaaaaccatcatctcttttgacattcttttaggaaactgagagatgcatgttttatataccaaaagaggtgaataatagttgataaaggtatgcaaaatacatactcctgtgaagtgtgaacatacaatttgtatgtaacgcatgcatgagcatataactn

SEQ ID NO: 36434 - DNA, 415 bp, Homo sapiens
cccgtctctaccaaaaataccaaaaaaattagccgggtgtggtggcacactattgtattcccagctacttgagaggaggaggcatgagaatagcttgaatcttggagatgggggttgcagcgagccaagatggcgccactgcactccagcctgggcgacaaagccagaccctgtctcagaaaacacatatacataaaaaatttttaaaagcacatttataggcctggtccccgaatagaggaccagggctggatggcgccttgggtccctgctccaccaagcaccagccctcacagtgacgcaggccctcactgcctacacacccaggcttctggcaacacagccactgaagacatccagtcccaatcgactcatttcacagcaggggaagcaggcagagaagtagctgctgaca

SEQ ID NO: 36435 - DNA, 416 bp, Homo sapiens
  misc_feature (1)...(416): n = A,T,C or G
aggtaagggtcctgtgaacttggcaatttcatttgccattacacaccgagagattgtaatggttagtgattccagagcctctcttataaacacttagattataggatgtgcatttctccttagaatgaaggctgggtatttccatttgcatctggatttagatgatttagggacaaaattacctacatgtgataaggtgaactcttcctaatgactattcttattcttctcttatttcatctttatctcaagacattatctttaattcagcaaatcaagtatttccctagaaagctatgtattaaaactctctatgaaaagntaaaataaaacatagagttgcctaaactgagaagttttgagtcactgtttggaatttcactccctcgctaatattggatgtgaaatctgctgtg

SEQ ID NO: 36436 - DNA, 405 bp, Homo sapiens
cgcccgggctgtgggaataagatggcggggaagaagaatgttctgtcgtctctcgcagtttacgcggaagattcagagcccgagtctgatggcgaggctggaatcgaggcggtgggcagcgcggctgaggagaaaggcggattggtatctgatgcctatggggaggatgacttttctcgtctagggggtgatgaagatggttatgaagaagaagaagatgagaacagtagacagtcggaagatgacgattcagagactgaaaaacctgaggctgatgacccaaaggataatacagaagcagaaaagcgagacccccaggaactcgtggcctccttttctgaaagagttcggaacatgtcgcctgatgaaatcaagatcccgccagaaccccctggcagatgttca

SEQ ID NO: 36437 - DNA, 405 bp, Homo sapiens
acgcgtgggggcaagtgccaccggggtcaagaagactctagccggggttcagataattccagttatgaggaagcactctctccaacatctcctgggcctttatcagtaagagctgggcatggagaacgtgacctggggaatcccaatacagctccacctacaccggaattacatggcatcaaccctgtgttcctgtccagtaatcccagccgttggagtgtagaggaggtgtacgagtttattgcttctctccaaggctgccaagagattgcagaggaatttcgctcacaggagattgatggacaggcccttttattacttaaagaagaacatcttatgagtgccatgaacatcaagctgggccctgccctcaagatctgcgccaagataaatgtcctcaaggag

SEQ ID NO: 36438 - DNA, 425 bp, Homo sapiens
gagcctggggttcggcgctatggaggagctcgatggcgagccaacagtcactttgattccaggcgtgaattccaagaagaaccaaatgtattttgactggggtccaggggagatgctggtatgtgaaacctccttcaacaaaaaagaaaaatcagagatggtgccaagttgcccctttatctatatcatccgtaaggatgtagatgtttactctcaaatcttgagaaaactcttcaatgaatcccatggaatctttctgggcctccagagaattgacgaagagttgactggaaaatccagaaaatctcaattggttcgagtgagtaaaaactaccgatcagtcatcagagcatgtatggaggaaatgcaccaggttgcaattgctgctaaagatccagccaatggccgccagttcagcagccagg

SEQ ID NO: 36439 - DNA, 479 bp, Homo sapiens
  misc_feature (1)...(479): n = A,T,C or G
aaaggnngnnnnnaactgatagnntcatgacaggctngaanncncggnnganctacgcgtncggactagttcttagccacttggacactgataacaagtcctgaactccttttttgttttgttttttgtgtttttctttttttgtcttatgttgtaatcattgtatagagctaaaaaaaattgaaaacaaacaaaaaaattgtcttgtattttccaaatgttaatacatttactttagcattgaagccactttgaaacctgagataaatgaatgtgaggtatcttttctgctttcctcatttgtgtagatgtactgtctgttctgttgatttaaattatttttttccagattggcacatgaaatatttaaacttttttgtgtgcctttctgtccaaatgttgcatagttaccagggaagattagtccagtgattacataagagttgggcaccataaattctctatattttgcctcccat

SEQ ID NO: 36440 - DNA, 419 bp, Homo sapiens
cgagtctttattggtaaagattgtataggcggatgcagtgatctagtctctttgcaacacagtggggaactgctgacgcggctaaagcagattggagctctgcagtaaccacagatctcataggaaatgttcaacaattctgtgaaaggtcacaggacccaattggagaaatcatatgaaacgcatagttggtcttggtgtcatatggatcaaaggcacaagtgcataggctgtggtcatgcggaacactctgttatttaagatggctatccagataatactgaacactgtgtatttattttatttagactaccagcaaagattaaagcatgaaatgtacaacatctgatagaacttacagccccctacaccaagagtgtatctgtgaaagagctcctacactttgataacttaagaat

SEQ ID NO: 36441 - DNA, 518 bp, Homo sapiens
  misc_feature (1)...(518): n = A,T,C or G
gggttcaaaaggggtaccaggntnnccnncattgatagccattgatcaccnctcgaaancccgcgncgacccacgcgtccgcggntattttgaagctttttcaatttgaggatgctataaaaacttagacttgttgcttgaatcttccataatagtatgtaggagcaatttctctaaacagcattttaagttatttatttgtgggtttttaaaatgtcaacaaaatgcatggcagtatttattttttatatcttcatataaaattaagtaaattatagcattatgaacattttagaaccatgcaagagaagttatagagaaagtaatttatggtaattttcataaagctttaaaatattttcatttgggctataacaaaatgagtacaaaggaactatttagcctggaggggcttttgttatttaaatgtcagatttctttgatacattcttcaaaaataatccttgtcctgcctctatgttccattattgggtttctttntttttttttggagacag

SEQ ID NO: 36442 - DNA, 393 bp, Homo sapiens
agctgctgaatgccatggtggcaaaactggggaaccgggaggacccactcccccaggactcctttgaaggcgtggacgaggacgagtgggactagcctgcgcccccgtcacctccacctcacctgtgctgccacttcctagtgcacacctcacggctcatcctcaagctggaagatacctctctggccccggcacatgtcacccctgcactcctgccttcccgtgggcacttccacatcctctgggcctctggcagttcccagggactgttttcacctctgctgtctctggggtcagctgctgctcatcagctgcccgctagcatgtggccaggggtgcagggtggcggggggtcagcagcatgtccctgggcaggccctgggcaccctgtct

SEQ ID NO: 36443 - DNA, 478 bp, Homo sapiens
  misc_feature (1)...(478): n = A,T,C or G
cccacgcgtncgggaatggggagggaagggcatagcctgctcctccatgagtctgacatctcagaaactgtgcagctgccggacgcctgggtcaggactccaagaccccacctcttaaggacaagaaaatgcctggttcctcagaaaagaccctcaaggaagaaggtgaaaacattacatccaaggattctcctgccacaactggattggaagaaaaggctgccgcatgatctcagcgaggagtgaaggaaccatgtcccggggaccgcgctcctccacctgcactcaccccctcacattctcttaagcaccctgtggcccttcgaggcctggcagaatggtggtgcccaccgggttgggccaaggctcaacgggcaaagttgtgcacactaaaatatcaaatcaaggtgcttggttctaaagaaatgtttttctaaagaaagctgtgctcttctgctgacccagatgagtanggcac

SEQ ID NO: 36444 - DNA, 416 bp, Homo sapiens
aaatttatttgggaccatgggaatgatagttgggaagaaaactatttgcacacgacagatttctagatactttttgctgctagttttatgtaatatttattgaacattttgacaaatatttatttttgtaagcctaaaagtgattctttgaaagtttaaagaaacttgaccaaaagacagtacaaaaacactggcacttgaatgttgaatgtcaccgtatgcgtgaaattatatatttcggggtagtgtgagcttttaatgtttaagtcatattaaactcttaagtcaaattaagcagacccggcgttggcagtgtagccataactttctgatgttagtaaaaacaaaattggcgacttgaaattaaatcatgccaaggttttgatacacttgtcttaagatattaatgaaacact

SEQ ID NO: 36445 - DNA, 397 bp, Homo sapiens
  misc_feature (1)...(397): n = A,T,C or G
ctaattttatggatggcttcacctggtctttaccgtttgatggagaaaaagtgacagaaatgttggggaatgtactgagtatttgctctgatcatgaactaatgactgagggggaaaaccagtttgatgcttgttcagctgctacccggaaagaaatcataggaaacaaaatactagcattttggccgatggctggagacttctctgttctcacggaggagagagaaagtgtgctgacactcaagggcctgactcccacagggatgttgcctattggagggctagctggaggacggcagaccctgcaaagtgccacagttgaggctattgaggctgaaaaagcaatacgaggattctctccaccacatanaatctgccgctatgaagaggcaaaggg

SEQ ID NO: 36446 - DNA, 430 bp, Homo sapiens
ataggcataatggaagcgatagatcttctttttcacatttcagtggcctgaagcacgaggacatacgtggaggtagcggatctcacaactggggaactgtcaaagacgaattaactgacttggatcaatcaaatgtgactgaggaatcacctgaaggcgaagaacatcatccactggcagacactgaaaataaggagaatgaagttgaagaggtaaaagaggagggtccaaaagagatgactttggatgagtggaaggctattcaaaataaggaccgggcaaaagtataatttaatatccaaaaaccaaatgaacgagctgatgggcagtggaagaaaggatttgttcttcataaatcaaagactgaagaagctcttgctgaagattctgttatggaccatcatttccggaagccagcatatgatataac

SEQ ID NO: 36447 - DNA, 394 bp, Homo sapiens
cgggtcatggcgccccgaaccctcatcctgctgctctcgggagccctggccctgaccgagacctgggccggctcccactccatgaggtatttctacaccgctgtgtcccggcccggccgcggggagccccacttcatcgcagtgggctacgtggacgacacgcacttcgtgcggctcgacagcgacgccgcgagtccgagaggggagccgcggccgccgtgggtggagcaggaggggccggagtattgggaccgggagacacagaagtacaagcgccaggcacagactgaccgagtgagcctgcggaacctgcgcggctactacaaccagagcgaggccaggtctcacatcatccagaggatgtatggctgcgacatggggtccgaccggcgcc

SEQ ID NO: 36448 - DNA, 416 bp, Homo sapiens
cccacgcgtccgactatctgcattatctatgcagcatggggtttttattatttttacctaaagacgtctctttttggtaataacaaacgtgttttttaaaaaagcctggtttttctcaatacgcctttaaaggtttttaaattgtttcatatctggtcaagttgagatttttaagaacttcatttttaatttgtaataaaagtttacaacttgattttttcaaaaaagtcaacaaactgcaagcacctgttaataaaggtcttaaataattgtctttgtgtaaaaaaaaaaaaaaagggcggccgttttaaaggatccttggaggggcccaagtttacgcgggcatgcgacgacatagctctttccttatagggagccgaattataacctagcttggaatttttgggaaggaactt

SEQ ID NO: 36449 - DNA, 424 bp, Homo sapiens
  misc_feature (1)...(424): n = A,T,C or G
cccacgcgtccgcccacgcgtccgcccctccccccgagcgccgctccggctgcaccgcgctcgctccgagtttcaggctcgtgctaagctagcgccgtcgtcgtctcccttcagtcgccatcatgattatctaccgggacctcatcagccacgatgagatgttctccgacatctacaagatccgggagatcgcggacgggttgtgcctggaggtggaggggaagatggtcagtaggacagaaggtaacattgatgactcgctcattggtggaaatgcctccgctgaaggccccgagggcgaaggtaccgaaagcacagtaatcactggtgtcgatattgtcatgaaccatcacctgcaggaaacaagtttcacaaaagaagcctacaagaagtacatcanagattacatgaaatcaatcaaagg

SEQ ID NO: 36450 - DNA, 418 bp, Homo sapiens
cggacgcgtgggtttaaagaggcagtaaacacacaccgtggtctgtgtgcccttgatgtggaagtccatggaacttttacctgggttaagaagttctttcctttaattaattaaataaataaaatctgcatttatgactcggctgaaggatatgctaagatagtcaagattcagaagcaggcatctcgaagtcatttcatgtggcttcatttaaaagaaatgctctcggatccagtacacttacatcaacttcataaatgcagccaatttacaataaacattccccttgcaacccctcctcccccacccacctcactctacctgaaaagatggctaattatgttagggccttgtgtattcatttatttgttgtcaaaacccggcggggtgttagctctgaaatggggaaaaggctctg

SEQ ID NO: 36451 - DNA, 535 bp, Homo sapiens
  misc_feature (1)...(535): n = A,T,C or G
gaagnncnnnggccaccttcgaggaacctctgtggtaccggcccgatttcatgnagatacacgcgtccgcccacgcgtccgctctattctatcagcagccaagggtcttcgtttgtcatgaaanccttgctgngccttccatcttctatgtcctgtgcccagactccctgcatccccaaggaaggggcatctccaacatcatcatccaacgaagactcagctgcaaatggttctgctgaaacatctgccttggacacggggttctcgctcaacctttcagagctgagagaatatacagagggtctcacggaagccaaggaagacgatgatggggaccacagttcccttcagtctgggtcagccgttatctccctgctgagctcagaagaattaaaaaaactcatcgaggaggtgaaggttctggatgaagcaacattaaagcaattagacggcatccatgtcaccatcttacacaaggaggaaggtgctggtcttggttcagcttggcaggaggagcanatctagaaacaaaggg

SEQ ID NO: 36452 - DNA, 431 bp, Homo sapiens
  misc_feature (1)...(431): n = A,T,C or G
cgaggtggtacgttcagtattcatgtcttcaacaacttctgcttctgggacgggcagaaaacgcacaatcaaggacttgcaagaagaagtttcaaacctgtacaataacattaggttatttgaaaaagggatgaagttttttgcagatgacacacaggctgctcttaccaaacacttgctgaagtcagtgtgtactgatatcactaacctcattttcaacttcttagcttcggatttaatgatggcagtagacgatcctgcagccattacaagtgaaataagaaagaaaattttaagtaaattatcagaagaaaccaaagtagctcttacaaaactccataactctctgaatgaaaagagcatagaagactttatttcttgtctggattctgcagcagaagcttgtgatattatggtgaaaaggggagacn

SEQ ID NO: 36453 - DNA, 424 bp, Homo sapiens
  misc_feature (1)...(424): n = A,T,C or G
tgtcgccatgggccgccgccccgcccgttgttaccggtattgtaagaacaagccgtacccaaagtctcgcttctgccgaggtgtccctgatgccaagattcgcatttttgacctggggcggaaaaaggcaaaagtggatgagtttccgctttgtggccacatggtgtcagatgaatatgagcagctgtcctctgaagccctggaggctgcccgaatttgtgccaataagtacatggtaaaaagttgtggcaaagatggcttccatatccgggtgcggctccaccccttccacgtcatccgcatcaacaagatgttgtcctgtgctggggctgacaggctccaaacaggcatgcgaggtgcctttggaaagccccagggcactgtggccagggttcacattggccaagttatcatgtccatccgn

SEQ ID NO: 36454 - DNA, 379 bp, Homo sapiens
agctcccagttcttctgtttccagcattttgtgtgtgtgttggaacatggtctttggagttaaaattgagtttgaatttttactccacttcttaccacctgtggcaagataagcaaggtacttcaccttgagcttcactttcctgatatataaaatgagaatgatactcactgctggataggtttgttgagaagatgaaattgaaagaagtgtttgaattaacagtaaatgttattttgttggcactaagtcgcagtcctaatctttgtttttgtagtcttctcccctgctcaaaccaaaatgaactattgaactattgcctgaggccatgggcatacataaacatacttaatgggtagtgtaggtttgggatacagcg

SEQ ID NO: 36455 - DNA, 419 bp, Homo sapiens
cggacgcgtgggcggacgcgtgggtagcagaataccaggcagacagaaccttgcaaacaccttaacttctaaccaaagactttaaaactctggctggacagagttttaagcactatgctgcaggaatcctgagaaaaaggggaaattaattctattaggaatggcccaaactgaattgtgacaggcagagggtgttcctgacagagggaagatgaatacacttgaccccaacatttctgcccatccctgatgaccaagacctcttcccagacccacagctgcaggggccaagtaataacagctcttaatagtttataatgcactgttttaatgctttacgactaaactcatctgatcctttcatcagccctagagggtagaaagttttcccaattctacacatggcaaaatggagaccc

SEQ ID NO: 36456 - DNA, 410 bp, Homo sapiens
ggggatcgtgagaaggttcttcaacatgattaacaagtgtatgatattgctgcaaaatttggtgggttggcagctggagaagataatggacagagaggttatttgctgacctatgttattgcatacattcgagacttggctttggaatactatgtattaggagaatcttttgagacttctgctccttgggacagggtggtagatctctgtagaaatgtaaaagaaagaataacaagggaatgcaaagagaagggtgttcagtttgctcctttttctacatgcagggtgacgcagacttacgatgcaggtgcttgtatctacttctattttgcctttaactacaggggaattagtgacccactgaccgtatttgaacaaactgaggcagctgctagagaagaaatccttgc

SEQ ID NO: 36457 - DNA, 483 bp, Homo sapiens
  misc_feature (1)...(483): n = A,T,C or G
gcgtatggacactcgaggacagtnccggaanncccggaacgacccacgcgtccgcggacgcgtgggcggacgcgtgggcgcttcttacctgacataattcctgccttaaaatggctaaaaggacgaaaagccctttgtttggggctcacactttctggacatatgaccagctgggccagggatgaccttaatagactctcctgaaccttttttggtctctccagcctttgattggcctgtaacatttctgggggcttattcgggattggagatggcagaatttctgtcttctttgcctgtgggctaaagccccaagatgtgggagatctggggtccttggcaccgctgggagagattcaccctgggaggagactggccctcccgcaatccagagccttaccctgacagcaccaaaggaaccactggaaatggttgatggacagtcacaggagccgagcacagacatgacgaccatgttctttg

SEQ ID NO: 36458 - DNA, 420 bp, Homo sapiens
  misc_feature (1)...(420): n = A,T,C or G
cggggttcacgatgtccgacgaggaagcgaggcagagcggaggctcctcgcaggccggcgccgtgactgtcagcgacgtccaggagctgatgcggcgcaaggaggagatagaagcgcagatcaaggccaactatgacgtgctggaaagccaaaaaggcattgggatgaacgagccgctggtggactgtgagggctacccccggtcagacgtggacctgtaccaagtccgcaccgccaggcacaacatcatatgcctgcagaatgatcacaaggcagtgatgaagcaggtggaggaggccctgcaccagctgcacgctcgcgacaaggagaagcaggcccgggacatggctgaggcccacaaagaggccatgagccgcaaactgggtcagagtgagagccagggccctccacgggccttcn

SEQ ID NO: 36459 - DNA, 457 bp, Homo sapiens
caactttataaactagcaaaaaagtgtttgcttattccaccagttctactgtgacatactcgagtataaagacatgtagcaataacggggagtggggggggagtctcacagtgcctttggaagggcccgaacttgccttaaatcttcctcaaccaaataagtattttattagtgcttgagagaatctgaatgtaagatgggctcaactgcacaaaaggaaaagattcttaccactttttttatatagatataaagcgaagcacccgccttagcgctgaaatatgtattacatgaacatgccttgtttaattacagaaaattccaaaactagtactatttttttttccatgtagaaaggcaggaatgtctcctaagctttcctggacagcaaatgaatgagcgggagctttacttcgtacggaggtacagttggagcactatatgtactctctggact

SEQ ID NO: 36460 - DNA, 410 bp, Homo sapiens
ttcctcatcactgttcctgtgctcacagtcatcaattatagaccccacaacatgcgccctgaagacagaatgttccatatcagagctgtgatcttgagagccctctccttggctttcctgctgagtctccgaggagctggggccatcaaggcggaccatgtgtcaacttatgccgcgtttgtacagacgcatagaccaacaggggagtttatgtttgaatttgatgaagatgagatgttctatgtggatctggacaagaaggagaccgtctggcatctggaggagtttggccaagccttttcctttgaggctcagggcgggctggctaacattgctatattgaacaacaacttgaataccttgatccagcgttccaaccacactcaggccaccaacgatccccctgaggg

SEQ ID NO: 36461 - DNA, 406 bp, Homo sapiens
  misc_feature (1)...(406): n = A,T,C or G
cccagtggttgattcttcaccacactgaaaccattaggaaaaatccttgtggttaacagcagaggcttcagagtgtaacctgtactcgggcctagaaattatttaaaatggcgactgatacgtctcaaggtgaactcgtccatcctaaggcactcccacttatagtaggagctcagctgatccacgcggacaagttagaaggtagaagatagcaccatgccgattcgtcgaactgtgaattctacccgggaaactcctcccaaaagcaagcttgctgaaggggaggaagaaaagccagaaccagacataagttcagaggaatctgtctccactgtagaagaacaagagaatgaaactccacctgctacttcgagtgaggcagagcagccaaagggggaacctgagn

SEQ ID NO: 36462 - DNA, 406 bp, Homo sapiens
aagaataaaaagagacgaaatcttgctagctgtatcatgagccctccagctgccccttccaacatcctcaccttcagaataaccactatggctgagtttatgataatcacctctgcatcttgctttatagtttttattaccaattacgtttctaaatactatagtatagctctgcctggttttatttgtttgtttaatatgcctattgggtctctttgaatgcataagttcttcctccctgacctttgaaatttgtttctttgaaaactgcatcatttgtcttgtagactttactccattggaattttgctgatcgcatgtctgtggtaaagtttaatgtcttccttagtcttctgtatttcttgccaactgaaagttgattacagaggcttaatcgttttttgtt

SEQ ID NO: 36463 - DNA, 397 bp, Homo sapiens
cccaaacgaagacagtccctgggataccgccgacactgacattatgcctactagcatagaccattaccgattgccccctctatggatgacggtcctatcatggatctgaatcagatggacactcacatgggagtcccgaaggtggagccaacacaagctctggtcctataaggacaccccaaattccagaatggctgatcatcttggcatccctcttggccttggctttgattcttgcagattgcattgctttctgcagtcgaagaaggtgtgggcagaacaaaaagctagtgatcaccagtggcaatggagctgtggaggacagaaagccaagtggactcaacggagaagccagcaagtcttaaagaatggtgcatttggtgaacaaggagtcgtc

SEQ ID NO: 36464 - DNA, 400 bp, Homo sapiens
  misc_feature (1)...(400): n = A,T,C or G
aaagaatcaagactttgttaagagcctaaaccgtggattcagctggatctgagtttgataccatagtgacttcctagtgacattgtgccaatcactttactgtcccaagctggtttccttatctgtaaaacaagtctagtatcatttgctttcaagatttgtgaggattcaatgagatcagttagatataaatcatttaatgtagtgtcttactccatgtaaatactccatagatactaacggtagccgnttgtattgttcttatctgaatgacagagttcagtctaagttatctttctcttatgggagaaactttgccttaggtcatagtgaatgttatttgtcattatgcacattgcactacaggtctctgtgttgtttgaaaaaattaaaaaggact

SEQ ID NO: 36465 - DNA, 406 bp, Homo sapiens
cattttgggaaatgcttgatttttttctattgcatttgtctgctaaacatttctttggataaatcctgcaaatacttctaacattattctttgattccagcttttagaatgggtgtacaatgccctgtttgtacttactggttagggtcagggtaacttgccagcccaagataaatactttaattgttaaaagtcagaagagacagaatatgtaggaaatgttttttgtttattatgtaaacatggcttacagaattatgaacagtggatagattaaaggcatttaatatttgtaattcataataactgtagaaatggccctaaagcatgctgcataattaataatttatattttcattattataagtgtttatattaatgatcttgcatttgattatatcaaatt

SEQ ID NO: 36466 - DNA, 420 bp, Homo sapiens
  misc_feature (1)...(420): n = A,T,C or G
atttttagtagagacggggtttcaccatattggccaggctgatctcgaactcctgacctcgtgatccacccgcctcggcctcccaaagtgctgcgattacaggcgtgagccaccgtacctggccttccctctttttttctgtttttaaaaacataccattaaataagtctttctggtaaaatcaagtataaatcatctgagcatctgtttctattatctgcgtttcctgttggtttttagttatctgaatgtgagacatcgtgaatacagtaagggtctggatgatgctatttttcagagaagaaatcactcttccttttgctaggcaggtagagtggggctgatcacctaatactgctagagactgagctgagggttgaggttgtgttgcaggttggataaggccgcattttgctctgn

SEQ ID NO: 36467 - DNA, 407 bp, Homo sapiens
caggaattcgagaccaacctggtcagcatggcaaaaccccgtctctactaaaagtacaaaaattagccaggcgtgatggcacgtgtctgtaatcccagctactctggagactgaggtgggagaatcgcttgagactgggaggcagaggttgcagtgaaccgagatcatgccaccgcacttcagcctgggtgacagagaaggactccgtctcaaaaaaaaaagaaaaaagaatagtcatttttaaactacctatctcatgcaatgaaagcattttcttccacaaagagcttaatcctcatgataggattgcctagggtctcccatttgcaggtttctgggttgatgtcttaatgcataatactgcaagtgacatcagctggctgtgatgcttcgaaataggtctgctc

SEQ ID NO: 36468 - DNA, 431 bp, Homo sapiens
cccacgcgtccgcagggccagggtgctgcttttgggaatgctgtacacttcagccattgtggcttttgtgttgtataagtgttgcagatgcagagatggctgggggtctgggtgccctgagtctgcatctctcatgggggcaccatagtactgagagcaagatacagtttccgctgtctgtaaaatgaagataatagttgattggcctccaacattatagagtaattttaaggattcagcgaggtaaggctgaatgtggaaggcacgtggtaaactgtaaatgaataatgaccatcacatttaattttcctacaatctgataaagagtagccacttgcttgaggtcacccagagcagcaactggtggagctggacactcagctagtgttcatactactaaagtggggccaactgtggcacaaggggttgat

SEQ ID NO: 36469 - DNA, 451 bp, Homo sapiens
  misc_feature (1)...(451): n = A,T,C or G
atagaaacctgataacctgcggaccgcnccggattcccgggagaccagcgtcggctccggcgccaaagtcaaaccccgtcacccgtcttttgccggtgagctcactagctgacccggcaggtcaggatctggcttagcggcgccgcgagctccagtgcgcgcacccgtggccgcctcccagccctctttgccggacgagctctgggccgccacaagactaaggaatggccaccccgcccaagagaagctgcccgtctttctcatccagctctgaggggacccgcatcaagaaaatctccatcgaagggaacatcgctgcagggaagacaacatttgtgaatatccttaaacaatcgtgtgaagattgggaagtggttcctgaacctgctgccagatggtgcaatggtcaaaggactcaagatgaatttgaggaacttacaatgtctcacan

SEQ ID NO: 36470 - DNA, 405 bp, Homo sapiens
acttgctcccgagaagaggagcgctcatgtcttttttgcaccccaagttggctggagcatcggccaccccaagattcatctgtgacctccaggcagcagtctctgctccagaatctctggacagagctgctggctgcttctgcgagaagagagagatgtggaaggcaccttctagaacagagcgagcctcaggttacttgaacttgaacggagactggagactcccggactttcccctaggactgggggccctgctggctgctgttggaggactgggtaaagacattgtagggaagggaagggcttttctccacacaacggcagagagtcctgctagatttcttgttgtcctgccagctatgcccatgcctgaggtggttctacctgtcacgggcaccctaactg

SEQ ID NO: 36471 - DNA, 474 bp, Homo sapiens
  misc_feature (1)...(474): n = A,T,C or G
agggggnnnnnnnnaactgatgtccgttgacngcntcgaantcncggnngacccacgcgtccggngcagaaacaggaagagcaagaagaggaacaggaagaggagggaaagcaggaagaaggacaggggactaaggagggacgggaggctgtgtctcanctgcagacagactcagagcccaagtttcactctgaatctctatcttctaacccttcctcttttgctccccgggtacgagaagtagagtctactcctatgataatggagaacatccaggagctcattcgatcagcccaggaaatagatgaaatgaatgaaatatatgatgagaactcctactggagaaaccaaaaccctggcagcctcctgcagctgccccacacagaggccttgctggtgctgtgctattcgatcgtggagaatacctgcatcataacccccacagccaaggcctggaagtacatggaggaggag

SEQ ID NO: 36472 - DNA, 386 bp, Homo sapiens
ggagagaaagcagcagagacagcaaaaccaaatcatgtcagcttggcatgtacttccctctgaaatagctaagaatccatttctgtaaaagcactgattatcagaaaaccttattggcctggccacctttggttcaaaccctcacattaataatgtggacagtagtatgaggtgtgccaaaggtggatgactcggcacctaagtgatgacacctaattacgaataggttcattaaagcagaccccctggggacctttgcttgaggatccttacagtcagaattcctgaatatatttgaaaataataattgcatctttattttcatatgttctgtatggtttggctgacttccccctcaaagtctgagttagagttttccttaatta

SEQ ID NO: 36473 - DNA, 489 bp, Homo sapiens
  misc_feature (1)...(489): n = A,T,C or G
agtgcctacggactacgggtatcctgcggaacngcnccggaantaccggaccgagccacgcgaccgtgcatcttttcccaccctgtcagtcattgtggtccctaaaacaagaggcttaaaaccgggctggcacccaacctgctccctctgatcctccatcagggccagatcttccacgtctccatctcagtacacaatcatttaatatttccctgtcttacccctattcaagcaattataggccagaaaatgggcaaattatcactaacaggtctttgactcaggctccagtagttcattctaatgcctagattcttttgtggttgttgctggcccaatgagtccctagtcacatcccctgccagagggagttcttcttttgtgagagacactgtaaacgacacaagagaacaagaataaaacaataactgtgaanaataatagagggggtcgtttctctctgtttatcgaatgcttatccgatccgcc

SEQ ID NO: 36474 - DNA, 418 bp, Homo sapiens
  misc_feature (1)...(418): n = A,T,C or G
acaccctagtggcccccacagtgtttctagcattgcaattgtaacagtcacttatttagcacttacaattacatagcaagtacttacatagtgctgagcatgtgccaaacaatggttttcatacttcgtatagattcacttatctaatatctccaaggagaagtgacttgctaaagcctcaagcagccatgcatgtctcaactgttatgcaaaccttggcagtcagagcctgtgctcttcctgtgctttgttccctgagtttggataccttcaaatgggaaatggtccccttttatcttaaacccaacaacttcacccatttagtttctgccagtctctgaaagcatttgcctctggccatagagaatgattttggataagaccaccagcacagggcagaaatgtgcagagtgtatan

SEQ ID NO: 36475 - DNA, 408 bp, Homo sapiens
ggaccatcaaagtgggagaccctgtgtacctgctgggccagtaatgggaaccgtatgtcctggaatattagatgccttttaaaaatgttctcaaaaatgacaacacttgaagcatggtgtttcagaactgagacctctacattttctttaaatttgtgattttcacatttttcgtcttttggacttctggtgtctcaatgcttcaatgtcccagtgcaaaaagtaaagaaatatagtctcaataacttagtaggacttcagtaagtcacttaaatgacaagacaggattctgaaaactccccgtttaactgattatggaatagttctttctcctgcttctccgtttatctaccaagagcgcagacttgcatcctgtcactaccactcgttagagaaagagaagaagaa

SEQ ID NO: 36476 - DNA, 432 bp, Homo sapiens
tttttagaacagttataggtttacagaaaaattggatggagattacagacagttcactcccttccccctcaactctcccaatcattaacatcttctatagtgtgttacatttgttacaattaatgaactgatactgatactttattattaaataaagtttagcattaacattagggtttactcctgtgttgtgcggctttggacaaatgcaggagagcaagtcccacccagtgtgctctggagcagccgctggccctaaaccccctgagccatacctccccttcttcctccccttgaacccccaagcaaccgcgaatctcattcctgtctcttaagactaccttttccaaattgtcacgtcgttggaatcatacagtatgtagcctctgcagactggcttcttgcacttagcaatgtatgtttgcagttccc

SEQ ID NO: 36477 - DNA, 426 bp, Homo sapiens
ctggcctcatcccacaagattgtgcgacctttccccgtcatagcctgtcgtgacaatcacgctattgaaagtggctttctagttaaaatgcaattggaaacttgacagtctctaaatgaattaaaagtttcctttggggctatttagcttaacagcagtctacaaataattaaagtgtgagcttaagaaaagtatctttgcggggagaaaaatgtcagatatttttaatgcccagctataaataattttggtgtcttgatatttatacatgcaaaatagaaaaaaaatgttcaacatttattgattgatagactgttaaaatttaatgtttggaataacatttggaagtagtagactttgcattaaaaaatggcttttctttaggaaagtataatcaattattttaatgaccatagcattcatgga

SEQ ID NO: 36478 - DNA, 403 bp, Homo sapiens
  misc_feature (1)...(403): n = A,T,C or G
aacggacggcgatggcgacggtcgcagcaaatccagctgctgctgcggcggctgtggcggcggcagcggcggtgactgaggatagagagccacagcacgaggagctgccaggcctggacagccagtggcgccagatagaaaacggcgagagtgggcgagaacgtccactgcgggccggcgaaagctggttccttgtggagaagcactggtataagcagtgggaggcatacgtgcagggaggggaccaggactccagcaccttccctggctgcatcaacaatgccacactctttcaagatgagataaactggcgcctcaaggagggactggtggaaggcgaggattatgtgctgctcccagcagctgcttggcattacctggtcagctggtatggtctagagcn

SEQ ID NO: 36479 - DNA, 411 bp, Homo sapiens
aatatatacagaataatacacacagttgtgtgtgcatataaaatacatatttacgccaggcgtggtggctcacgcctgtaatcccagcactttgggaggccgaggcaggcggatcacctgaggtcaggagtttgagaccagcctgacatggtgaaaccccatctctacgaaaaatacaaaaattagctgggcatagtggcgggtacctataatcccagctactcgggaggctgaggcacgagaatcacttgaagccgggaggtgggggttgcagtgagccgagatcacaccactgcactccagcctgggcaacaagagcaaaactccgtctcaaaaaagatgaaaataaaataaaatatatatttacaggcctacaacttttgcctcagactgttccccttttctaagggg

SEQ ID NO: 36480 - DNA, 465 bp, Homo sapiens
  misc_feature (1)...(465): n = A,T,C or G
gcgttttaaagacatctttcaggagatatatgacaagcagtacaagtcccagtttgaagctcaaaagatctggtatgagcataggctcatcgacgacatggtggcccaagctatgaaatcagagggaggcttcatctgggcctgtaaaaactatgatggtgacgtgcagtcggactctgtggcccaagggtatggctctctcggcatgatgaccagcgtgctggtttgtccagatggcaagacagtagaagcagaggctgcccacgggactgtaacccgtcactaccgcatgtaccagaaaggacaggagacgtccaccaatcccattgcttccatttttgcctggaccagagggttagcccacagagcaaagcttgataacaataaagagcttgccttctttgcaaatgctttggaagaagtctctattgagacaatngaggctggcttcatgaccaaggactn

SEQ ID NO: 36481 - DNA, 429 bp, Homo sapiens
tgggcctgctgagataatccaggatattcttcctactcaagctcctcaatctaatcacatctgcaaaaactgccttttgctatagaacaatgacaggagattagaatgtaaacatatttgggggaccgttattcaacttaacacaatacgtcccccttcatcaggtggagcttattttccctccttccttgagtgtgggctggacttagtgactaacttcctaagaacagagtatggtaagggaggaggagagtaacttcatagtacagaaacctggaaacactgtcttggccaggtggtcaaagctaatatcatcaagtcatgtcgatagcatatactcccaatatactgtgatgagaacggcaattcacctgtgtggtattctcataacctataacccaatctagtctagacatgagatatagaaaa

SEQ ID NO: 36482 - DNA, 379 bp, Homo sapiens
  misc_feature (1)...(379): n = A,T,C or G
gcatgatcagtgcggttatgtggaaacaacaacaaacaaacgaagctatctgagtgaactgctaatacagaaacttaatgtagacctgtttggggtctactattgttttagaatgaaggaattgtattattgtgtgtatatataatttgtaaataaaaagtatggagatgatacggtgttaaaaaaaatcatggtgaggctacaatactcaagtaacaaggtttgggacaatgtctaagggttaaagtgccaaagccatttctgtactaactgttctcttgttccggtaccggggagaaggatgacccctccttattctccaattcatgtacagtattttgtcctagcagcataaagacctagctcttttcttacaagn

SEQ ID NO: 36483 - DNA, 383 bp, Homo sapiens
cttacaccagttcacccttcccagaacgtatccataccttgagaatgcaggagctctgtgagctccaccgtcagcaccattcagctgcatcccttgtgcacagaactgtttgccagcgttgggtgggacacccgtggcggctgctccctcaaacctcccttctgtggactgacctctcacctccgcctgttgttcctgcaccacatcagataagcatgtgaaggagggccaactggcagctgcgggacccttggcttgtcccccactgacaagtcccacctgctgggtgaggacgagactgtttccatctcaggcatgtatcccaccaagtgcctccctcacagccatgcccagaagcctcacacctcgtgaccaccaccacg

SEQ ID NO: 36484 - DNA, 478 bp, Homo sapiens
  misc_feature (1)...(478): n = A,T,C or G
cttacatgttaataatttacttgcatacttatgagaatttcacattggaattcataatggtaaaacaacatacatctgccaatatacgttttttctgttggtttaagagaagataactgacagctttacctacttcctacagatgcatctaaacccagatattactgagaagagtgtattgactctgagtgtaagagagtatgtgtttttttgtttttagttctgctctagatcataattgtaaaaaatattaagtcataatctgttacactaaaatttgtcagccaaatgttagatgaaatgtctgcactgtagtctcagatcactgtcacgtatataaattgcttcttcattntaatttgtagaagtactttacagtaggaaacgccaagaaacaacttttatactgttaaaaggctttattccccttcctaaatgttttattagaccatagtgttttgctcactgaagaagcttn

SEQ ID NO: 36485 - DNA, 409 bp, Homo sapiens
aaagaatatggaatagccttgccatgtctgttggacgctgacaaatatttctggtaggcgcttttgtacttggtgaacaccagctttaaggaagatggcccagactatacagaacacctgccatgcccttgagactgcagactttcatctacaacagtggttaatgtaaaagagtagttatggtgtaaactggtgaatttcttcttccctttgtatttctaattgacctttcctccctgtaaagaaaagaattttcaagcaggtaggatatcctctcttcttctgtacatgtgctatgttgctagtcggaactttccattataaagtttcctgtcagcttttcacctaatggttttgtggtagtattgatgattattcctcaaatccgttggttaagagctgtataatg

SEQ ID NO: 36486 - DNA, 441 bp, Homo sapiens
gcttaacttaagactggctatcctacatgggtcctgcgcagggaggaactgctctgagtagatatttagctgcctcccattccatttggcatatcttagcgccaggttttctttagatgggaggcacctctcttggaatggacttctctcccacacatgtctctttcattaactccgagaccttattccttgaccttagctcaagttatttaacttctgcatccttttgccagaggtgtctcacgggcacggtgctggttaagaaggagaaagcaagacattatatggatatgcaggtccttttcctgtgtaatctctaatgcattccatattccttaattctgatctctcctagtagcctagtaagtggattcatgtcactgctttgtcgacaggacagcattatttggaggctggtggttctcagcgaggcgccccctt

SEQ ID NO: 36487 - DNA, 397 bp, Homo sapiens
cccacgcgtccgtggcgcctcggaggcgttcagctgcttcaagatgaagctgaacatctccttcccagccactggctgccagaaactcattgaagtggacgatgaacgcaaacttcgtactttctatgagaagcgtatggccacagaagttgctgctgacgctctgggtgaagaatggaagggttatgtggtccgaatcagtggtgggaacgacaaacaaggtttccccatgaagcagggtgtcttgacccatggccgtgtccgcctgctactgagtaaggggcattcctgttacagaccaaggagaactggagaaagaaagagaaaatcagttcgtggttgcattgtggatgcaaatctgagcgttctcaacttggttattgtaaaaaaaggagag

SEQ ID NO: 36488 - DNA, 396 bp, Homo sapiens
gcgcggagagacgcagcggaggtttttctggcttttgaccccagcggccggatggagaaatcctccctgcagcggatcctcaatagccactgcttcgccagagagaaggaaggggataaacccagcgccaccatccacgccagccgcaccatgccgctcctaagcctgcacagccgcggcggcagcagcagtgagagttccagggtctccctccactgctgtagtaacccgggtccggggcctcggtggtgctcctgatgcccctcacccacccctgaagatcccaggtgggcgagggaatagtcagagggatcacaatctttcagctaacttattctactccgatgatcggctgaatgtaacagaggaactaacgtccaacgacacgacgaggat

SEQ ID NO: 36489 - DNA, 433 bp, Homo sapiens
  misc_feature (1)...(433): n = A,T,C or G
ncttagtactcctgcaggccccggccgttattgcagggacgacccacgcgtccgcccacgcgtncggacagggagacccccaggttagttgccccgaggatggcggaggatgggccgcaggcagccgagcgttcagggctgcgctccggccggctgagagggcacgtgccccgtcacagtctggactcctgggcctggattgatgtgtctcacagactcggaagggttctgctcctcctcctccccctgaacaatgctggcagttgctacaaatagatttattggaggcttatggctccggttcccccacagacccgctcatgagtctctgtttgttcttcccttttcttttgccctgtccctcaccttgggtcgggggtgctggagtggaccacaatgttgtgctgggggatgggggggtctctctttgccg

SEQ ID NO: 36490 - DNA, 502 bp, Homo sapiens
  misc_feature (1)...(502): n = A,T,C or G
aggaatccgaagcactcgataccgtttctactcgaaanggcccggaannnccgggtcgacccacacgaccggaatccgataaccatgtctaattctaaagtgcacagcagttgctcagagtattaaaatgaatgaatacactaatgcactgaatttttggaacaactctgataggcaagtcttctgcccattccatagatgaaaaatctgggaaagagatccaagcattaggcactgtcctaagaatgctacatatattaacatattaatcttacaacaacctcatgaggtatatgctgtattatccccactttacagatgaaacaactgaggcacagagagtttatgtaataagctctaggttactcagctaataagtggtagtgctaggatctgaatccacgcagtctggcctcacaggctccactcttaaccactacacagactgcctcatatggatactgatgaattctaaacacacacacacacatatatataaagg

SEQ ID NO: 36491 - DNA, 415 bp, Homo sapiens
  misc_feature (1)...(415): n = A,T,C or G
tttactttcttggtaacaaaaactaaaataaggaatagaaaagctgtttttcaagctgacagtccaattaagggtagccaagaccttgcatggtagagtaggaatcatagtgtcagtgaggtcccgtgagtctttgtgagtccttgtgtcatcgttcgggcactgtttttttatgcaagggcaaaaatctttgtatctggggaaaaaaaacttttttttaaattaaaaaggaaaataaaagatattgaggtcttcctagtgttacttaaattaagatcaaggtaagaaacattgtaaaaaaaaattacaaaagtgctatttgtttcctaaaaacagtgatttctattaaaaaggtgtcagaactggaaattcancnagaaaaaacacnattccggggggggcctttttaaagaan

SEQ ID NO: 36492 - DNA, 479 bp, Homo sapiens
  misc_feature (1)...(479): n = A,T,C or G
cattgaacgccntgcgatagagcnccgtaatacccggcncgacccacgcgtccgcggacgcgtgggcggacgcgtgggttttgaaaatgctgggatcttacttggtggtgcttccacacttctgaaaagagaaatggataattgaaaaagccacaagtcggggaggttacaagacagccgaataggaacagctccagtctacagcttccagtgtgagcgatgcagaagatgggtgatttctgcatttccaactgaggtaccgggttcatttcactggggcttgttggatagtgggtgcagcccacggagtgtgagctgaagcagggcgaggcatcacctcacccgggaagtgcaaggggtcagggaattccctttcctagccaagggaagccgtgacagatggcacctggaaaatcgggtcacttccaccctaatactgcactttttcaatggtcttagcaaatggcacaccacganaa

SEQ ID NO: 36493 - DNA, 412 bp, Homo sapiens
cgtgactcatgatctagcccgtgccctggctgaacagctgccacccaacatgtccgagcgcttccgggagacgttcctgccatcgggccgcccgccactacctggctcgttgctgcatcggcccgacctggctgaggtgctggatgtacttggcacctccggcccggctgccttctacgcaggtggcaacctcacactggagatggtggccgaggctcagcacgcagggggtgtcataaccgaagaggacttcagcaattacagcgcccttgtggagaagcctgtgtgtggcgtgtacagaggccacctggttcttagtcccccacctccgcacacgggccctgccctcatcagtgctctcaacatcctggagggcttcaatctcaccagcctggtatcccgagaacaggct

SEQ ID NO: 36494 - DNA, 459 bp, Homo sapiens
cgccattctcctgcctcggcctcccagctactcgggagcctgatgtgggaggatcccttgagcctgggaggtcgaggctgcagtgagccatgatcacgctactgcactccagtctgggcaacagagcaaaatcctatctcaaaaaaaatatatatattatccagccccaaatgtttatggggttgttattgataaaccctgcattaaacaatcccacagtcggtgctgcggtgagccgtgatggtaccactgcattccagcctgggtgacggaatgagaccctgtctcaaaaaaaaaaaaaaaaggtaaaattttttcccccctttttgggcaaacaagggaggaacccctgtggaagcgctaggggtttaaacaaaggaaaaccggggggaaagcgaaattttaaaggaccccctcctaccacaatgcggttcaaaaacaaaaaaaaaaaaataaggg

SEQ ID NO: 36495 - DNA, 403 bp, Homo sapiens
attcttgcagccaccctgcgaaccctgccacactgcgatcgcatcatcgcggtattcggttcgctgcgttcccgccgccaccgcctcggcgccctttcttggcccttgttcccccaaatgtctgactctgactctcggactgagaaacgcaagaaaaaaagaccaaatggcaaagcaaccttctgatgtaagttctgagtgtgaccgagaaggtagacaattgcagcctgcggagaggcctccccagctcagacctggggcccctacctccctacagacagagccacaaggtaatcctgaaggcaatcacggaggtgaaggggacagctgcccccacggcagccctcagggcccgctggccccacctgccagccctggcccttttgctaccagatccccgctt

SEQ ID NO: 36496 - DNA, 395 bp, Homo sapiens
aaagaattctgtagagtagtgaaggggcatattttactcaccatgactatatgctaataagaggttgtggatagagaatttaagagtttgtgtataggtcagggatcttgggttgggtcactaatgtatctatagcctggcccacaggctgtcaatgaacgttcattgaatgagttttcccaaacccccattttattttttcacttcttattctgtaaactaaatttttttatttggcaaaattttagtgagacatgttttgagttattggcacattaaaaaatatatcttaaaatttaaaatatttttaaatatttatatgttagtagttataatacttttttaataagttaaggcttcacatggatttacatataaactcctcaacagcagca

SEQ ID NO: 36497 - DNA, 484 bp, Homo sapiens
  misc_feature (1)...(484): n = A,T,C or G
tggagatcanaattgtacccctgcggtacctttgcggactttgcgggtccaccccgcgttcgattcttgtcaaagcatgctggagtgattctaatcatgaaagaacaattagaaaaaatccaaattgacagatattctgcagaataaatggcctgacctcatcaaaaacatcaatgtcatgaaaaacacaaaacattgcagatagcgtgaaattaaagattacagagatataacttaatgcaagatctctgactggatcctagactgcaggaaaaagtctgctataaagaacatttggatcacttgtagtagctgggaaataaaacaaaacattatttgtaaaaggggggaaatctgaacatgggtcttgcagtatttatgacagtttttgcggggcagagatttctagattgacagctgttttagtactttcaaggtgatgctctgtctgctggtttgcattgtttctgtctgagttaagaga

SEQ ID NO: 36498 - DNA, 428 bp, Homo sapiens
tgtcaatatgtgatgaggacatattatattccgctattctctttagctcaaggaagaataaagaatttggaccagaattacaaccacattatgacgaattttctaagcaaaagaaacaaagtaactgctgaggttaacaaagatgtaataattctcttcacacagccttgtactgttttattgactgtattatcacaaatcctgagcttaacgaaagtctttataagtcagctcatgaaaacaggcacgtggccagtaagaatttaatttcataccaataacacttcagacttcggatgtatttaaggctgtttgcacatatttatagaatgcgtggcgtagatgatgggacagctccccctcagcaagactctggcctaaatgtatttgctttatttacacaacaagaggataagcgtaaacacggg

SEQ ID NO: 36499 - DNA, 557 bp, Homo sapiens
  misc_feature (1)...(557): n = A,T,C or G
ccgctcgcgcttgttgaccgtcccagagagctcgttctgcatccaaggtcccccaccnccnccnccccccccccattcgaacgcctgnatangagtcctgaaganccgcgncgacccacgcgtgcgctcaaatcttgttggatctctgcagggcttgtgacctttgaagtcatatttgttgatggttgacaaagcttgcttcactccatcagagaatgactatcaatttttttttaactgtcctatcacgtcctctcctgtcacccattttgaagagtggcagaacttgaagttcaacttcctctgtaaatatccaagtataaagcccaggaacttctaaaataacccagatgcgctttaattttttttaatatgttttgatcacagaacttctagaataacccagatgctctttcatattcttttaatacatcttgatcacagctgggggaaaaaaagctttttaattctataccttcctagcagataagcgaagagcagggaaagagacctttaaatattttgctataaaaaaaattgggataaggttctatcca

SEQ ID NO: 36500 - DNA, 503 bp, Homo sapiens
  misc_feature (1)...(503): n = A,T,C or G
tagtttttagttacntaancggnnnnnnnnnnttttgatacgcccttaggtaccggtccggattcccgttgaanccatcgtgcgcccacgcgtacgcggacgcgaggagtccttcctgagatccgtgctatctgcattgaggaaattgtttgttggatgcaaagctacagcacgtctttcctcaccgacagctatttaaaatatattggttggactctgcatgataagcaccgagaagtccgcgtgaagtgcgtgaaggctctgaaagggctgtacggtaaccgggacctgaccgcatgcctggagctcttcactggccgcttcaaggactggatggtttccatgatcatggacagagagtacagtgtggcagtggaggccgtcagattactgatacttatacttaagaacatggaaggggtgctgatggacgtggactgtgagagcgtctaccccattgtgtaggcctctaattgaggcctggcctctgctgagagtgattn

SEQ ID NO: 36501 - DNA, 424 bp, Homo sapiens
cagacccaacaccaggtcttgggggtgacaaagtccgacggagtcaaaggattgagaagtagacagtttgagagagaaaggtgggataccagggggccatcaccattgtggaggctgtgaaggccctgagctctgggagcccatgctatttattggtaatccaacaaagaaacaagtggtgagaatgtggaggtggaaaggacacattgcattaagcacatgatttacagctgtaatggtttagcatttatatggaacatgttctgctacttgagataatgggagtaggagcctaggaaggctagaagcaaaaagccagcaagtctagatacattccagaggacatgtcagacatggaagccctgcctcagtttctcccgacactcagctttttcccaacaattgtcttagcaaaaactcagag

SEQ ID NO: 36502 - DNA, 399 bp, Homo sapiens
aagaggtggggagttttgctcttgttgcccagactggagtgcaatggtgtgatctcggctcactgcaacctccacctcccagaagctcagcatgtcagccagatgaaccatggaaactggagaggaacacaggcgataaggaacagtgactgtgtccagggctgtagccaggatggcactgcagtggaagggcagaatggcctgtaagaagacaccaagaggggcacttggcctcgggcctggaaaagaatgtgtggaggcagaatgttaacaccagagagacccaggggatgaatcaggggtatgtttgaccccaggctggacaagcataggacagtgtgatctgagaggccacatcacagctgagttcaagctcgggcctcaggaacagagccagta

SEQ ID NO: 36503 - DNA, 407 bp, Homo sapiens
caaaggaacagagcgcgaacggcttctaaatttctatccctctcgcagggcatcctgactgaactgtgtgtaagggtcggtcggtttaccactggacgggtgctgcatcggcaaggccaagttgaacaccggatggtgccaaccatcggttgtttggcagcagctttgaacgtagcgcctgtgaactcaggaatgcacagttgacttgggaagcagtattactagatctggaggcaaccacaggacactaaacttctcccagcctcttcaggaaagaaacctcattctttggcaagcaggaggtgacactagatggctgtgaatgtgatccgctcactgacactctgtaaaggccaatcaatgcactgtctgtctctccttttaggagtaagccatcccacaagttc

SEQ ID NO: 36504 - DNA, 431 bp, Homo sapiens
ttcgttccgtgctgagccgaaaccttcaccaacatcggctctggtgacagctgctccccctccacctgagttggggtgggggggaaagggagggcgagcccttgggatgccgtctgatgccctgtccaatgtgaggactgcctgggcagggtctgcccctcccacccctctctgccctgggagccctacactccacttgggagtctggatggacacatgggccaggggctctgaagcagcctcactcttaacttcgtgttcacactccatggaaaccccagactgggacacaggcggaagcctaggagagccgaatcagtgtttgtgaagaggcaggactggccagagtgacagacatacggtgatccaggaggctcaaagagaagccaagtcagctttgttgtgatttgattttttttaaaaaactcttg

SEQ ID NO: 36505 - DNA, 398 bp, Homo sapiens
atctaaggccttccctgtcagaagggggttgtggctaaagccacattacaagctgccatcccctccccgtttcagtggaccctgtggccaggtgcttttccctatccacaggggtgtttgtgtgtgtgcgcgtgtgcgtttcaataaagtttgtacacttaaaagaaaaaaagaggataaaaaaaaaaaaacaaaaaaaaaaaaaataaaaataacactaaaaaatggacactgtggtcaggggggggggtctttttaaaaagaatctgggggggcctacttttttgcggttcaataaaaattttttttttttttttttgggggggatatttatcccccctggggggtttttgaaagaagcttttttttttggggggaaaaaaaaaagaacaaaacac

SEQ ID NO: 36506 - DNA, 490 bp, Homo sapiens
  misc_feature (1)...(490): n = A,T,C or G
aggtggcattgataactgaaggccntgcgcacggaaccccgggtcgacccacgcgtccgcgactgagcacaccctctgccagcacctactgagggaaaggaaaagcccctggaaatgcgtgtgacctgtgaagtggtgtattgtcacagtagcttatttgaacttgagaccattgtaagcatgacccaacctaccaccctgtttttacatatccaattccagtaactctcaaattcaatattttattcaaactctgttgaggcattttactaaccttataccctttttggcctgaagacattttagaatttcctaacagagtttactgttgtttagaaatttgcaagggcttcttttccgcaaatgccaccagcagattataattttgtcagcaatgctattatctctaattagtgccaccagactagacctgtatcattcatgagataaattttactcttgcaacataactaccatctctctcttaaan

SEQ ID NO: 36507 - DNA, 411 bp, Homo sapiens
cccacgcgtccgcccacgcgtccgcgctgactgggagggatggtagcctggccagcaacccttattctggtgacctcacaaagttcggccgtggggatgcctcctccccagccccggccacaaccttggcccaaccccaacagaaccagacgcagactcaccataccacgcagcagacattcctgaacccggcgctgcctcctggctacagttacaccagcctgccatactatacaggggtcccgggcctccccagcaccttccagtatgggcctgctgtgttccctgtggctcctacctcttccaagcagcatggtgtgaatgtcagtgtgaatgcatcggccacccctttccaacagccgagtggatatgggtctcatggatacaacactggaagaaaatatccacccc

SEQ ID NO: 36508 - DNA, 397 bp, Homo sapiens
tttgccgccagaacacaggtgtcgtgaaaactacccctaaaagccaaaatgggaaaggaaaagactcatatcaacattgtcgtcattggacacgtagattcgggcaagtccaccactactggccatctgatctataaatgcggtggcatcgacaaaagaaccattgaaaaatttgagaaggaggctgctgagatgggaaagggctccttcaagtatgcctgggtcttggataaactgaaagctgagcgtgaacgtggtatcaccattgatatctccttgtggaaatttgagaccagcacgtactatgtgactatcattgatgccccaggacacagagactttatcaaaaacatgattacagggacatctcaggctgactgtgctgtcctgattgttg

SEQ ID NO: 36509 - DNA, 476 bp, Homo sapiens
  misc_feature (1)...(476): n = A,T,C or G
tgggatgggggaaatgaagcatcgatggagcccgtgagannnggctcgacccacgcgtncggtaaatttacctgcaccttggaaggacacagcagaggatgaaatattttggagtgtgatgggcagaaaattccatcctaaagcagactatgtagctctgtgtagtgagaatgatccagctgccacaggtagaaggagatgctttatctttccaacaattaataaaatccctatctgcactaaaggaacccctgaacaagggatctgttctgaatcttctggaatgagtgagaagtgaacttgaagcacgctgggagagcctggggaggaggaagatagtgcgttggtccttgaggttgtattgttgcctgtataactatgatgaatgaggtgccccagcacaggaattttaaaacatgtcatggaatattctgcatgggaagaaagacggaaatacaattttagatgatgcaagt

SEQ ID NO: 36510 - DNA, 426 bp, Homo sapiens
  misc_feature (1)...(426): n = A,T,C or G
tccagtttgcaaaatgctatttatactttgagttactcttcaaaagtggtatacctctagtttggagctgtgctgtaaaaacaagagtaacatttttatattaaagttaaataaagttacaactttgaagagagtttctgcaagacatgacacaaagctgctagcagaaaatcaaaacgctgattaaaagaagcacggtatgatgaccaaacataaaaagtgttttataattgttggtgttttaataacaactaatattattactctgatagttaaactaactcgagattctcagagtttatgcccctatgattggattggtttccaaaacaaatgctattatttctctaaagaagaaggagattggaattcaagtaaatacaactgttccactcaacatgccgacctaactataattgacaacan

SEQ ID NO: 36511 - DNA, 404 bp, Homo sapiens
  misc_feature (1)...(404): n = A,T,C or G
cccacgcgtncgcttgcagatgaaaaaagtctccagagcagacttctgacaggaaaggtttagatgctggagagttgaagaggtgtaagaagagatcgtgccctcatttttcacttatttttttggttattcatttataataaaaggttggcattgatatggtacaacctgcaaattacttgcagttctgagtttcagataaaacattataaaacattaaattcaatacatactgctcctttgaaatttgggtaaaaaattgtacaaccgtatatatagtcatttttgtattttttctatgttgtgaaaaccaaaattgtaattttataagtctttgattcactaaaattatataatttaaatgtattttttgtatatttagaaataaggagtccagagactan

SEQ ID NO: 36512 - DNA, 478 bp, Homo sapiens
  misc_feature (1)...(478): n = A,T,C or G
natgatcgcatcggaccgatcgaaatctctgggtcgacccacgcgtccgggctgatcttggacttgcgagccaccatgcctggctgggttttttaaaaatagaatctcactgatagcctgcaagaaacagatgcagtgcctgcttccgtatcagtccaaggagccctcgtgtttgccacctttacctttgaacctccccctgcctccctgcctgtgtccgcttttgcagctcaatgcagccatgacaaggaaagaaaagacaaaggaaggccagagagccgcgcagttctctgcaggtgcagatgcaggcagtggaggtggcctgagcaggcagaaggacaccaagcgccctatgttgcttgtcattcatgacgtggtcttggagcttctgactagntcagactgccacgccaaccccagaaaataccccacatgccagaaaagtgaagtcctaggtgtttccatctatgtttcaatc

SEQ ID NO: 36513 - DNA, 258 bp, Homo sapiens
cgtggcactgatcactgacggtcctgcgcacggaaccccgggtcgacccacgcgtccgccttatcctggaaccatacatcaggataaggattttgattttccacacgtagcttgaaatttcaataaactttgctctgtttttctaaaaataaaaaaaaaaaaaaaggggcggccgttttaaaggatccttcggggggcccaaccttacccgggcatgcaacgtcatacttctctccttatggggagccgaattaaaac

SEQ ID NO: 36514 - DNA, 423 bp, Homo sapiens
gcttaccatgagttgccagggctgagagagatggataaggattcgcggcggcgacagattaaattccccagttacattatagacttggaggggggggatcttctcatcgttagaggccccgatcatgggagataggcggttcggagccaggtctgcctaactttgtgttcactgatgttagggctgctagggctgcaaaggagggcacccctactcgcctaagagctttctcctctcttctctttttcccctttgcctctctccttacatcacctgcccactaagtagacttgtccttgtgtggacgggagccggaaagccttgagaacttattcctcgacccggacatggcacaggagaaaatgaaactagggttcaagtcgctggcgagttccactaccgcagacggaacattctgagaga

SEQ ID NO: 36515 - DNA, 378 bp, Homo sapiens
agcctgcccttgcatggcgtctgctgtaggaggagagagctctgctggcatgagccacagtttcttgactggaggccatcaaccctcttgggtgaggccttgttctgagccctgacatgtgcttgggcactggggggcctgggcttctgaggaggcctcctgccctgatcagggaccctccccgctttcctgggcctctcagttgaacaaagcagcaaaacaaaggcagttttatatgaaagattataagcctggaataatcaggctttttaaatgatgtaattcccactgtaatagcatagggattttggaagcagctgctggtggcttgagacatcagtggggccaagggttctctgtccctggttcaactgtgag

SEQ ID NO: 36516 - DNA, 509 bp, Homo sapiens
  misc_feature (1)...(509): n = A,T,C or G
cgggggganaagaangaactgacgccgtcggactcgaccgccttccggggncgacccacgcgtccgggcgaaatgagactgttcgtgagtgatggcgtcccgggttgcttgccggtgctggccgccgccgggagagcccggggcagagcagaggtgctcatcagcactgtaggcccggaagattgtgtggtcccgttcctgacccggcctaaggtccctgtcttgcagctggatagcggcaactacctcttctccactagtgcaatctgccgatatttttttttgttatctggctgggagcaagatgacctcactaaccagtggctggaatgggaagcgacagagctgcagccagctttgtctgctgccctgtactatttagtggtccaaggcaagaagggggaagatgttcttggttcagtgcggagagccctgactcacattgaccacagcttgagtcgtcagaactgtcctttcctggctggggagacagaatctctagccgacat

SEQ ID NO: 36517 - DNA, 402 bp, Homo sapiens
  misc_feature (1)...(402): n = A,T,C or G
cccacgcgtccggaaacttactcaagtttatagaactcttcatggagcttacacaaaaattctggaagttatgcatacaaaaaagagacttttaggcactttcttcagagttgccttttatggccaatctttttttgaagaagaagatggaaaggagtacatctataaagaaccaaagctcactggcctctcagaaatttccttgagacttgttaaactttatggtgaaaagtttggtacggagaatgtcaaaataattcaggattcagacaaggtaaatgccaaagagcttgatccaaaatatgctcatatacaagttacttatgtgaagccttactttgatgacaaagaactcacagaaaggaagaccgagtttgaaagaaatcataatatcagcagatn

SEQ ID NO: 36518 - DNA, 433 bp, Homo sapiens
cggacgcgtgggcgggagccggctgacgggtggacaagggggggttagcagctgggctgcgaccgttagggaggggctcaaggtgtgcatgtgtgagggaagagagagagagagaagggcgcctcagaggtgactttcagcctgcgagccttcttcccggggcgccataaacgcccccaatttcccagctgctaaaggaagaggaagatcttagcaaagcaatgtctcaagatggtgcttctcagttccaagaagtcattcggcaagagctagaattatctgtgaagaaggaactagaaaaaatactcaccacagcatcatcacatgaatttgagcacaccaaaaaagacctggatggatttcggaagctatttcatagatttttgcaagaaaaggggccttctgtggattggggaaaaatccagagaccccc

SEQ ID NO: 36519 - DNA, 416 bp, Homo sapiens
  misc_feature (1)...(416): n = A,T,C or G
gaagccttcccagctacccgaagctcaggtggccttcttgcaggtccccgtagcaccctgagcctgtaccttgggtggcacttgttatgctatcctgtgctagccgtttgtgcctcgtctcgctgttagattgtgagttcccatgggcagagacccactgtcgttccccgtgtgtccccagcccagtccctgtcacatttgttaaatgaaagaacaatgaagcccagtgtaacgtcagtccacagaaatagccacagcttccagtggtggccgtagacttggctcggaacttagtggcaccagagtaactctagtcagttacagtaaaatccactgtgtgtggaaggcagaagctagcggttgtatcccaagcatcttttgtatttgtctttatactttgctgaattctctgaaan

SEQ ID NO: 36520 - DNA, 439 bp, Homo sapiens
cccacgcgtccggtgatggtagatatcaggccctggtctgcggcttggaagtttcctgtgaataagaaaaacatcatcgcttcttgagtcacaaggatgataggatgagaaaaagaaaggacaaaggcaccagaggaggtatgccaaatgggaaacttttcatcactttccagataaaaactagcagtctgtgaaggcaactggtctgatttttcaggaaccagacactggaacatgtcgtctgatgtacatcacaccaagaaataaaaaaagaattggaaagccaatgtccaattatttactaaaacagaatccactggagagaaatgcaaaggcaggtaaaaaggcaatctcttaacatgaaaactcacaactgtaaaatgagaacctaaactatacagcgacaaactcaggaaaaagtctccagctactgctgtct

SEQ ID NO: 36521 - DNA, 479 bp, Homo sapiens
  misc_feature (1)...(479): n = A,T,C or G
gagggtcnnnnnaattgatacccatcgaaccccctcggaancnncggncgaaccacgcgtcccgaaaaaagtttgttttaaataggatattttttagagcttttttaggtttatagaaaaaactgaagggaaaatacagagagggcccataaaccctctcaccttcctcccccttgcagnttcccctattaatatcttgcattgatgtggtagattaattgcaattgatgacccaatattgatgttattattaattaaagtccattgtttacattagcgttcactctgcttcagctatttatctttctctccctcctccttcctgaacccctggcaatcactgatctctttaccgtcttcacagttttaccttttttagattgtcatctaggtggaatcatacaatatatagcctttttagaatggcttctttcactgaattatatgtatttaagattctttcctggcctttcatggtg

SEQ ID NO: 36522 - DNA, 401 bp, Homo sapiens
  misc_feature (1)...(401): n = A,T,C or G
attgccaagtgactcagaggccccagacctaaagcaggaggagcgtctgcaagaactggagagctgttctggactgggtagcacatctgatgatacggatgtcagggaggtcagttcccgccccagcacaccaggcctcagtgttgtgtccggcataagtgcaacctctgaggatattcccaataagattgaagacctgagatctgagtgcagctctgattttgggggtaaagattctgtcactagtccagacatggatgaaataactcacggtgcccaccagctgacctctcctccttctcagtcagagtctctgctggccatgtttgatccactgtcttcacatgaaggggcttctgctgtggtaaggccaaaggttcactatgctaggccatcgcatn

SEQ ID NO: 36523 - DNA, 379 bp, Homo sapiens
cggacgcgtgggcggacgcgtgggcgggtggtttgcttatgcgcagacggggaagcggagccaacatgccagtggcccggagctgggtttgtcgcaaaacttatgtgaccccgcggagacccttcgagaaatctcgtctcgaccaagagctgaagctgatcggcgagtatgggctccggaacaaacgtgaggtctggagggtcaaatttaccctggccaagatccgcaaggccgcccgggaactgctgacgcttgatgagaaggacccacggcgtctgttcgaaggcaacgccctgctgcggcggctggtccgcattggggtgctggatgagggcaagatgaagctggattacatcctgggcctgaagatagaggattt

SEQ ID NO: 36524 - DNA, 461 bp, Homo sapiens
  misc_feature (1)...(461): n = A,T,C or G
nattgatccccctgcggnaccatcgacggaccttccgggncgacccacgcgtncggtaacaagtattgcctagcctggacacacaggcggcttgaaacctcaagtgcaccaacagaaagagctccaggaagaatcagaggagtgggatgtgaagcccctcgaagtcagtgagttgggggaatccctccaatttttcttttcttctctaccccagctcctgggcagtaacatggaggtggcagtggtggcacagtgacggtagtgtgagctgggtacgcacttgaaacctgagagggtaacgctaccctctgtctagaggagccatggccccaaaagcatggggcaaccaccttctgcagctcctttctgcccccctgcgctgggccctggatgcagtttcagggagtatgcagcagggtaggtagggaaagagccccagatttgtggctggaggtcttgtn

SEQ ID NO: 36525 - DNA, 407 bp, Homo sapiens
  misc_feature (1)...(407): n = A,T,C or G
tcaagagaggaattacgcacaacttgacagtctaatatataactattgcattaaaggttgactctttggtaaaaaagaaaaaggaaggtttgaaaactggtcagtggataattgttaaagaggtagtcttcgggtatagtggcaacttggtagagtagaaagggcactgaactaggaatttagcaacctatgttttagttctaattctgccactagatagctgattgagctctttggactttagtgtcttaattttataaagtaaaggaaaggccgggcacagtggctcatgcctgtaatcccagcactttgggaggccgaagcgggtggatcgtgaggtcaggagttcgagaccagcctggccaagatggtgaaaccccgtctctattaaaaatacaacaatcagn

SEQ ID NO: 36526 - DNA, 441 bp, Homo sapiens
  misc_feature (1)...(441): n = A,T,C or G
cggacgcgtgggcgtggccaaggccccgcaggaacgcgccgaggtctccctcaccctccaggtgtccttcgcacccaacagtgcgtctgaggaacgagctgcagtttgagcgttcccctgagatgtgcgtagcctccgtgtaaatgtccactcccatggcttaattgcctatcagacgcattttcccagacgaaagcaatgttgggttggggaagacagtgcagccacccagcctttaccagcagcgtacggcagacgaaggcagtcgaggtgtggaggtgatcacgaagatacatgtgtttgactgtttaatttgaaagtttacattttttatgctttgtgttggtgtgtaatttttgtactcttggtggctagtttttgtcaaatcttttttggaatattgcttanatgttttgattttatgatagtgaagcttgtatt

SEQ ID NO: 36527 - DNA, 467 bp, Homo sapiens
  misc_feature (1)...(467): n = A,T,C or G
caatgttaaccggaattccactattgaaaacaccaggcggcatattggaaaaggagttcatctttattatgttggaggggaggtgtatgccgaatgccttagtgacagtagcatctttgtgcaaagtcggaactgcaactaccatcatggatttcatcctactactgtttgcaagatccctagtgggtgtagtctgaaaatttttaacaaccaagaatttgctcagttattggcacagtctgtgaaccatggatttgagacagtctatgagcttacaaaaatgtgtactatacgtatgagctttgtgaagggctggggagcagaataccaccgccaggatgttactagcaccccctgctggattgagatacatctgcacggccccctccagtggctggataaagttcttactcanatgggttcacctcataatcctatttcatctgtatcttagatggccgcaggcn

SEQ ID NO: 36528 - DNA, 400 bp, Homo sapiens
  misc_feature (1)...(400): n = A,T,C or G
cccacgcgtncgcccacgcgtncgcgagagtacaaggtagtgggtcgctgcctgcccacccccaaatgccacacgccgcccctctaccgcatgcgaatctttgcgcctaatcatgtcgtcgccaagtcccgcttctggtactttgtatctcagttaaagaagatgaagaagtcttcaggggagattgtctactgtgggcaggtgtttgagaagtcccccctgcgggtgaagaacttcgggatctggctgcgctatgactcccggagcggcacccacaacatgtaccgggaataccgggacctgaccaccgcaggcgctgtcacccagtgctaccgagacatgggtgcccggcaccgcgcccgagcccactccattcagatcatgaaggtggaggagatcg

SEQ ID NO: 36529 - DNA, 439 bp, Homo sapiens
ctcatcagccaggccccgaggctcctgccctcccaaagacagctgctcagctcaagaaagaggcaaagaaacgggagaagctagagaaattccaacagaagcagaagatccaacagcagcagccacctccaggggagaagaaaccaaaaccagagaagagggagaaacgggatcctggggtcattacctatgacctcccaaccccacccggggaaaagaaagatgtcagtggccccatgcccgactcctacagacctcggtatgtggaggctgcctggtacccttggtgggagcagcagggcttcttcaagccagagtatgggcgtcctaatgtgtcagcagcaaatccccgaggtgtcttcatgatgtgcatcccaccccccaatgtgacaggctccctgcacctgggccatgcactcaccaacgccatccaggactg

SEQ ID NO: 36530 - DNA, 400 bp, Homo sapiens
atcccagcccacccatgggaggccaggagatagaggaggttcatctgtcagagtgtggcccttcgtcttgggggagtgcatgtgaccgctcctgccccttgatggatctactctttctggtatcatggaatgagaccaaaccatgcacaggagactctctgttgacagttgtttttaaattgcctggttaattgagcttctataaaggcttctttgtgccaagtatcgggacacgtgatacaaatagaaaattccacacacatcgaacattgcatcatcaaaaatgacagcgatgtacccttgccccttaacgcagccaagaaacaagggtgacgggctactcttcacatatggagccagccaccacccttgagtgacagtagctcgacacagaacatta

SEQ ID NO: 36531 - DNA, 406 bp, Homo sapiens
  misc_feature (1)...(406): n = A,T,C or G
atcatgcggagccggctgaaatgctccaactttttcaaagtgtgggtggtccagtttggactgatgggaatcttcttgtcattctttttaaacggatgataccgatggaaataaaaggtgggaaatatattcaaaaaaaaaaaaagggggggcccgttctagagaacccttggggggcccaaatttaacggggacagcaaaggaaatacctttttctttatagggaggcttataaaacttggcttgggcaccttcgagaaaaaccctaatttatggggtgctatttgtgggaccatccacctccgggcacttaaagcttttagggagaataaaaacttttggcgggaacatggggaaaacccacttggaataccttctggcacagagagtgttgagganaacccct

SEQ ID NO: 36532 - DNA, 398 bp, Homo sapiens
agggtagatgctcaaatattaatttcctccttgccttccttatctaccctgtgtcctccatttccccgtatgattccaacccaatatagcaaatgacatttacatgttatgaaaacatctattgggtaaaatcagatcttggataaagaaattctgacttttatataagcttttggtagacagaaaaaacagaaaggtattcgttggtagaacatttttaagttcaggaaagaaagctggaataatactacgtaactttgtccaggttactttgactgaaacacgtttttggtggatttcttttcctcaaagaactctctaaatgcaactccttgctggattcctcacccatcatcctgttggaaacccttactagacctatgtatttagggagtttt

SEQ ID NO: 36533 - DNA, 416 bp, Homo sapiens
  misc_feature (1)...(416): n = A,T,C or G
attgggatatagtcactgtaatggtgctattaacaaacagtcaacaccattgtattttttaacttcgtgttctgtatctcctcagccatgtatcttaaatatattttgtcatcataatctttctttatggngggggcagactttgcacttactgcagtgcaacacttgcactttaattttcctccaactgtctaaaattagagcaaatacattggcaatacagctgcttttgctctgagctacaatcatggcttttcatgttacttaccaagtggtgtttctggttaggaatcacagctgtaaaattgatttcagttcatcacacttcttcatgatgttgcccctaaattttgcacactatattcttgtatattatttcaaataaatggaaaaaaaagtaaaaaaaaaaaaaaagg

SEQ ID NO: 36534 - DNA, 426 bp, Homo sapiens
catgccctagctgctcatgtttcccacctggagaatgtgtcagaggaagaaatgaacagactcctgggaatagtattggatgtggaatatctctttacctgtgtccacaaggaagaagatgcagataccaaacaagtttatttctatctatttaagctcttgagaaagtctattttacaaagaggaaaacctgtggttgaaggctctttggaaaagaaacccccatttgaaaaacctagcattgaacagggtgtgaataactttgtactgcacaaagttattcacctgccagcaaaagaaaggcaaacaatagttgagttggcaaaaatgttcctaaaccgcatcaactattggcatctggaggcaccatctcaacgaagactgcgatctcccaatgatgatatttctggatacatagagaactac

SEQ ID NO: 36535 - DNA, 479 bp, Homo sapiens
ttagtacttttaatcctgtaatatctcagaatctaaaattatcagactaacatgcagcctatgcttctgataaacatttactttgtgataattttgaggaaatattttgagatagattctattagtatgtattttatagagagagtttccagctagtgtgttgagctcaaaatgtttctgtttgttagttgtcctagcatattggggcttcttcacctcatcctttgagaattgctgggattacaggcgtgagccactgcgcccggccacattcagttcttatcacagaaataacccagacttagtcttgaatgatacgagtatgcccaatattaatgaaaaaatataagaaaaggttatcttaaatagatcttatgcaaaataccagctgatgaaggcatctgatgccttcatcctgtcagtcatctccaaaaacagtaaaaataaacacttttttgtggggcgatatgaaattcttt

SEQ ID NO: 36536 - DNA, 404 bp, Homo sapiens
  misc_feature (1)...(404): n = A,T,C or G
cacggctctgcccaggttaagggccacggcaagaaggtggccgacgcgctgaccaacgccgtggcgcacgtggacgacatgcccaacgcgctgtccgccctgagcgacctgcacgcgcacaagcttcgggtggacccggtcaacttcaagctcctaagccactgcctgctggtgaccctggccgcccacctccccgccgagttcacccctgcggtgcacgcctccctggacaagttcctggcttctgtgagcaccgtgctgacctccaaataccgttaagctggagcctcggtagccgttcctcctgcccgctgggcctcccaacgggccctcctcccctccttgcaccggcccttcctggtctttgaataaagtctgagtgggcggcaaaaaaaaaaaaaaan

SEQ ID NO: 36537 - DNA, 476 bp, Homo sapiens
  misc_feature (1)...(476): n = A,T,C or G
nattgaacgcctgaaggtcctgcggcagaagcnccggaattgaccgacgcgaccacgcgtncggcgagaacatctgcctactgcagacgttttccctctgcctcaccgctgaggtcctgctgcagctggccgctgggatcctgggcttcgtcttctcagacaaggctcgagggaaagtgagtgagatcatcaacaatgccattgtgcactaccgagatgacttggatctgcagaacctcattgattttggccagaaaaagtttagctgctgtggagggatttcctacaaggactggtctcagaacatgtatttcaactgctcagaagacaaccccagtcgagagcgctgctctgtgccttactcctgttgcttgcctactcctgaccagctggtgggaattctgctgtcccagatcctagtgaatcagatcaaagatcagatcaagctacagctctacaaccagcagcaccgggcg

SEQ ID NO: 36538 - DNA, 422 bp, Homo sapiens
  misc_feature (1)...(422): n = A,T,C or G
atactcatggccatcaacggcaaggtgttcgatgtgaccaaaggccgcaaattctacgggcccgaggggccgtatggggtctttgctggaagagatgcatccaggggccttgccacattttgcctggataaggaagcactgaaggatgagtacgatgacctttctgacctcactgctgcccagcaggagactctgagtgactgggagtctcagttcactttcaagtatcatcacgtgggcaaactgctgaaggagggggaggagcccactgtgtactcagatgaggaagaaccaaaagatgagagtgcccggaaaaatgattaaagcattcagtggaagtatatctatttttgtattttgcaaaatcatttgtaacagtccactctgtctttaaaacatagtgattacaatatttagaaagn

SEQ ID NO: 36539 - DNA, 434 bp, Homo sapiens
cccacgcgtccgccttgggattttagaaattgtggcttttccataactcatttactccaacagttgaagttacacacattgctcccaaatttggaaatagaccacagtaccttacctttcattccccatctggcctttaccttctttgcttcagtggttgaaaacagttgccatattcaaagtatagtagatttcaacctcacacaaatgacaagtcccattttacaatcctaggaaggcccaccaatttcatttcacgcgccagggcggctgcagttggaggccgagggcagccctctgctcactgaatgtcttgcatgtgctgactgctgcccgcagtgctgaacatgccccaccgcccaggcccagcactgcttgttgggtcagcatctagtgctgctgtcacatctttgtctgcacagccagtaggattg

SEQ ID NO: 36540 - DNA, 397 bp, Homo sapiens
ttgcactataggaaagagttaaatgttgttactatatactgaatgtaaacaaaggaattatggctggtaacataggatcttagtctaagtgaatcccttaaactcaaggagcatttataaataggacaaatgcttatgaaattaagatttgtaatatttctctctttgtagagaaatttgccaatttactttgttattgttacccaaaataaatacacgatcatcccattctttttggggaaaaataacaaagtaaattggatgatcgtgtatttatttttttacttcctcagctgtagacaggtccttttcgatggtacatatttctttgcctttataatcttttatacagtgtcttacagagaaaagacataagcaaagactatgaggaatattg

SEQ ID NO: 36541 - DNA, 478 bp, Homo sapiens
  misc_feature (1)...(478): n = A,T,C or G
cattgaccnccttgcgatagagcnccgtaatncccgggncgacccacgcgtgcgattcaagaagtctcatgccagccccacctattggaataaggtctgagttttattcttatctctttggtagtaattctgaaacttagaaagtacactggttagcaatgcttgggaccaacaggttgttctggtaaataaatctgtttcatattgtcagtgcaacaaaatgtccccctctgcattatgttattggtactcaacacgtccgagtcataactctgtcctttgcttcttatagaggtattaggtcttcaagagcagaagtaagactgtaatagggaatactcaggggaaggcaggcaaaggctagtcatctaaaccaattctagatgtcttgataggggcagatggctcttgtagggcagaaaggaaagaccccttcataagggtcacaacttgacattctataacaaaagacaggttg

SEQ ID NO: 36542 - DNA, 419 bp, Homo sapiens
cgcgcggagaagtgcggcggagcggcgcctgcattagcaggtatgcaaagaagccttttcaccctgatgtccttagagataatatggatcagtccagagttctcctctgggtgaaagcagaaccctttatagtgggtgccttgcaggtcccccctccatccaagtttagtcttcactatctcaggaagatatccacctatgtgcaaatccgggccacagaaggagcttacccgcgcctctactggtctacatggaggcacatcgcttgtgggaagctgcagttggccaaggacctggcgtggctttacttcgaaatatttgatagtctttcaatgaagacacctgaggagcgcctggaatggtctgaggttctgtccaactgcatgtctgaggaggaagttgaaaagcagagaaatcag

SEQ ID NO: 36543 - DNA, 416 bp, Homo sapiens
cggacgcgtggtcggactcgtagagggacatacaagttcataccatcatgccgagctactttattttttagagacggagtcatgctgtgatgcccatgctgatctcgaactcctggcctcaagccatcctcccgcctcaggccgctgagcagctgggattacaggcacaaacctctgcgtccagactacatctttttgacaagactctggtattctttgttagccttcttgctttctggcacaagatgaggcaggagtatcatctacacttcctgctccagacctggaatcaaccatttcttcacagaaccctcacttcttttatgtgggaggtttcattatgtttgacagcagagcatagaattgcagcctggcacccattgacagcttatatagagcaagaaatcccctcaaaa

SEQ ID NO: 36544 - DNA, 460 bp, Homo sapiens
  misc_feature (1)...(460): n = A,T,C or G
cggacgcgtgggctgactctggaatggtgtatactgccacatcagtgtttgagtcagtccccagaggagaggggaaccctcctccatcttttttgcaacatctcatttcttccttttgctgttgcttcccccctcacacacttggttttgttctatcctacatttgagatttctattttgtgttgaacttgctgctttttttcatattgaaaagatgacatcgccccaagagccaaaaataaatgggaattgaaaaaaaaaaaaaaaaaaaaatangggggcgccccttttaaagaacccttggggggccccaagtttacgggggtgggcaaagaaaaatttttttccttatagggggcggaataaaaacctctctggaaactttgggaaaggacctttttttttggggggggaaatattggaccaacctccctccagaaattaaagcttttagggaaaa

SEQ ID NO: 36545 - DNA, 390 bp, Homo sapiens
gattttaaaattttatggcaatatgttcttatattcttagttgaaaaatctcttaaatagttgatggcctgtcatgacctcatgacctatcccagctgatttttggggttttttttgttggttttttgggtgtttttttgagacggagtctcgctctgtcaccaggctaaagtgttgtggtgcgatctcggctcactgcaacctccgcctcccaggttcaagtgattctcctgcctgagcctcccgagtagcagggactgcaggcgcacgccaccgcgcccagctaatttttgtatttttagtagagatggggtttcaccatgttggccaggatggtctcaatctcctgacctcataattcacccacctcagcctcccaaagtgctggga

SEQ ID NO: 36546 - DNA, 402 bp, Homo sapiens
ctggccacctcaggagcacgctgtctcttcccgacgtgcagcccggggcccggccctgtccccgggtgactgctccccggcaggactgcacatctgtggcggcaggcccagctcagggctcgggggaggttcggccttgccttcaaagagctccctctcctgcagggcgagcgcagagcggcgggcgagaccacactgcgtgtgctgagggcgcactggtcttagcgggagggaagcctcacgagcctgtacacttggaggagccctaagcgttaggatctgctgcgagggctgcctggaacggaggtgagaggatacaagtggcccggggcaagcatagcgaatcactggctaatctggccttcgaggtagtgaaaggaaaaaagggaaatgaagctgact

SEQ ID NO: 36547 - DNA, 413 bp, Homo sapiens
  misc_feature (1)...(413): n = A,T,C or G
cacagatctgcattgccctggtcattttagaagtttttgttttaaaaaacaactggaaagatgcagagctactgagcctttgccctgaatgggaggtagggatgtcattctccaccaataatggtccctcttccctgacgttgctgaaggagcccaaggctctccatgcctttctacctaagtgtttgtattttattttaaattatttattctggagccacagcccccttgcttatgaggttcttatggagagtgagaaagggaagggaaatagggcaccatggtccggtggtttgtagttccttcaaagtcaggcactgggagctagaggagtctcaagctccccttaagaagaactggtgccccctccagtcctaatttttcttgcctgccccgccttggggaatgcctcn

SEQ ID NO: 36548 - DNA, 427 bp, Homo sapiens
gaccacgcaccatgatgccttggccatcctccgccaagctcgagagcccaggcaagctgtgattgtcacaagaaagctgactccagaggccatgcccgacctcaactcctccactgactctgcagcctcagcctctgcagccagtgatgtttctgtagaatctacagcagaggccacagtctgcacggtgacactggagaagatgtcggcagggctgggcttcagcctggaaggagggaagggctccctacacggagacaagcctctcaccattaacaggattttcaaaggttggcataaaaccgggtcatgctgcgggggaagaaggagtccaccacgttctgtgggaggtaaccgctgaggtcggtatggaagaatgtgaccaggttggtcttggtgggttccctgtgaaggcaacagcagagct

SEQ ID NO: 36549 - DNA, 397 bp, Homo sapiens
  misc_feature (1)...(397): n = A,T,C or G
ctcaacatcccggccttcgtcaagttcgcctatgtgtccgagcgggaggatgagttgtccctggtgaaggggtcgcgcgtcaccgtcatggagaagtgcagcgacggttggtggcggggcacctacaacgggcagatcggctggttcccctccaactacgtcttggaggaggtggacgaggcggctgcggagtccccaagcttcctgagcctgcgcaagggcgcctcgctgagcaatggccagggctcccgcgtgctgcatgtggtccagacgctgtaccccttcagctcagtcaccgaggaggagctcaacttctagaagggggagaccatggaggtgattgagaatccggataacgaccccgagtggtggaaatgcaaaaatgcccggngccagg

SEQ ID NO: 36550 - DNA, 474 bp, Homo sapiens
  misc_feature (1)...(474): n = A,T,C or G
cttgaacccttcgatgagcccggtatnaccgggccgacccacgcgtncgcccacgcgtgcgcccacgcgtncgcggacgcgtggtgcacacctttggttctcatcatcactgcctacagccacgtggcagctgcagttctacgaatccgttcagtggagggccgaaagaaggccttctccacgtgtggctcccacctcaccgtggtttgtcttttctttggaagaggtatcttcaactacatgagactgggttcagaggaggcttcagacaaggataaaggggttggagttttcaacactgttatcaaccctatgctgaaccctcttatctacagcctcagaaaccctgatgttcagggtgctctgtggcaaatatttttggggaggagatcactgacctgagagggaatggggtccctcctttcctgccttttctggactgaggaaaatttcccatgaagacagtaccacgag

SEQ ID NO: 36551 - DNA, 461 bp, Homo sapiens
aaaagactcatgcccccacccccgcaaaaaaacaaagattcatggctggaccatgtatgatgatgaaagcctgtgtctttgagggattctaccctgaacatacctcacagatcctccctgtcatgccacatttcactgattggaatgtggaaatggaaaaggaatttaggatgtgcattttcacctgaggtttccctgcatccctgcagtgccaaagccccaccttcagggaccacctggaatgtgtgaggggctgacagcacagtaacgtgcatacatatctgcagggctggaatggaagctttaaaggtggtagtgatttttattttggaagaatcatgttacctttttgttaaataaaatttgtactcaaaaaaaaaaaaaaggggcgcccgttttaaagaatccttagggggccccaatcttacgcgggcaggcagaggtatagctttttccttata

SEQ ID NO: 36552 - DNA, 426 bp, Homo sapiens
  misc_feature (1)...(426): n = A,T,C or G
agaactgctacgactccgtgcctatcacccgcagcgttcacgacaaccacttctgtgccgtgaacccccacttcattgcagttgtgactgagtgtgctggtggaggggccttcctcgtcatccccctgcaccagacagggaagttggacccccactacccaaaagtctgcgggcacagaggcaacgttttggatgtcaagtggaacccttttgatgattttgagatcgcctcctgttctgaagatgccacaattaagatctggagcatccccaagcagctgctgaccaggaacctcacggcctacaggaaggaactcgtgggccacgcgcgcagagtaggcctggtggagtggcaccccacggccgccaacatcctcttcagtgctggctatgactacaaggtgatgatctggaacctggatacan

SEQ ID NO: 36553 - DNA, 429 bp, Homo sapiens
  misc_feature (1)...(429): n = A,T,C or G
gatcagatacattctcctggtcatttcccctctctgccgcttagacaagagaatcctccttccactggactctcacagtcctttgcgcattcattcaacatctatgtactgggctctcccactgttcacccggcattgttctaggtgatggggctacagcatggccaagacagagtccctacccccaaggcaggattcagtctcattttactgtctttcccatccccagcactgtctggtcctgtgtgtcactgaaggaataaagggatgggccctggaaagggtgggtcagagctgaccttggtgaagcctgagtcaggccacagagctgggagtcaggcatgtagaggatacagcctctaaggctctgagagattaacagcctcctgtctttctgcgaccaccctcctggaacacgcagtcacgtgn

SEQ ID NO: 36554 - DNA, 496 bp, Homo sapiens
  misc_feature (1)...(496): n = A,T,C or G
ggggaaaccgatnagccgtgggaactgaccgacatcccgagncgacccacgcgtccgcggacgcgtgggattggctcgagttgctacttaagggaccatgtaaaaactcaaaggactttttaagtacctaggggtgttatttttcatatttgaaaaattcagtgagcatctattgagccaggccttgtaataggtacctccctgtgtggtagcatattaaatactgatgtcggcatcgtgagatagatgtcactctcaaataacatgttatggaaatggttaggttatgggtgttttgctacagatcacgtcgcagaggtggaattcggacccgagtagcataactcagtctagtgtgctatgtctgactgggcagcaaggtagaagagtgggcagaagctcctaataccttgccttttgaaatacccttcatttcatccattcactttccagaggatggtttcctggcacccacattattttctttctggaaaga

SEQ ID NO: 36555 - DNA, 429 bp, Homo sapiens
cccagacagaagagaccacggtaaagatcagctgacggcctctgtgggaacaaagacagggaaaggggaaatgagttcaccagaaaccaacaggcagcacaggaggtggtaaacccgaaaaagaaaatgaagaaaaagaaatacgtgaattctggcacagtcaccctgctttcctttgctgtggagtcagagtgcaccttccttgactacatcaaaggagggacccagatcaacttcactgtggccattgatttcactgcctccaatgggaacccctcacagtccacatccctgcactacatgagcccctaccagctgaacgcctacgcgctggcgctgactgccgtcggagagatcatccagcactacgacagtgacaagatgttccctgccctgggcttcggggccaagctgcccccggatggcaga

SEQ ID NO: 36556 - DNA, 386 bp, Homo sapiens
cacaccagtttctttgctcttccacagaagacttatccccaggtcccactctgtatctctctacctttgtcaggcatggaagaaagggaattttcttttcctatcctcaactgctagaaggggctggaaaataccctgggtctgggggtatgagtttcttccctgtcaatcgtaagagagagagagagagagagagagagagagataatccatttaacagaacactcttgtgctccagaaacatatgacagccctctccttcagccgctgtgtagagaaaacattctctattttaagcactgagttccaggaaggaggcgtgctctaatagggcttagtgacatgattaatccccttgctggaataaacctagcttgagactctga

SEQ ID NO: 36557 - DNA, 427 bp, Homo sapiens
cccacgcgtccgcggacgcgtgggctggccgagcaggaggcgccatcatgggagtggacatccgccataacaaggaccgaaaggttcggcgcaaggagcccaagagccaggatatctacctgaggctgttggtcaagttatacaggtttctggccagaagaaccaactccacattcaaccaggttgtgttgaagaggttgtttatgagtcgcaccaaccggccgcctctgtccctttcccggatgatccggaagatgaagcttcctggccgggaaaacaagacggccgtggttgtggggaccataactgatgatgtgcgggttcaggaggtacccaaactgaaggtatgtgcactgcgcgtgaccagccgggcccgcagccgcatcctcagggcagggggcaagatactcactttcgaccagctggg

SEQ ID NO: 36558 - DNA, 402 bp, Homo sapiens
actgtgttcactagcaacctcaaacagacaccatggtgcacctgactcctgaggagaagtctgccgttactgccctgtggggcaaggtgaacgtggatgaagttggtggtgaggccctgggcaggctgctggtggtctacccttggacccagaggttctttgagtcctttggggatctgtccactcctgatgctgttatgggcaaccctaaggtgaaggctcatggcaagaaagtgctcggtgcctttagtgatggcctggctcacctggacaacctcaagggcacctttgccacactgagtgagctgcactgtgacaagctgcacgtggatcctgagaacttcaggctcctgggcaacgtgctggtctgtgtgctggcccatcactttggcaaagaattct

SEQ ID NO: 36559 - DNA, 465 bp, Homo sapiens
  misc_feature (1)...(465): n = A,T,C or G
nattgatacccctgggaannatcgatggccatgcggaaccgccccggagggcccgggtcgacccacgcgtccgagaaaatcgcggggagtttttggtcgggagagtcttttagcgctcggcgggcagcagtgcgcaagcccctcggcttcaaccgccacaatgctgccagcagcgccaggcaaggggcttgggagcccggaccccgccccctgcggcccagcgcccccaggaaatacaaaagatataataatgatatatgaagaagatgctgaggaatgggctctgtacttgacagaagtatttttacatgttgtgaaaagggaagccatcctgttatatcgcttggagaatttctcttttcggcatttggagttgctgaacttaacgtcttacaaatgtaaacttttgatattatcaaatagcctgcttagagacctaactccaaagaaatgtcagtttctggg

SEQ ID NO: 36560 - DNA, 420 bp, Homo sapiens
cccacgcgtacgcccacgcgtacgcagcattcgggccgagatgtctcgctccgtggccttagctgtgctcgcgctactctctctttctggcctggaggctatccagcgtactccaaagattcaagtttactcacgtcatccagcagagaatggaaagtcaaatttcctgaattgctatgtgtctgggtttcatccatccgacattgaagttgacttactgaagaatggagagagaattgaaaaagtggagcattcagacttgtctttcagcaaggactggtctttctatctcttgtactacactgaattcacccccactgaaaaagatgagtatgcctgccgtgtgaaccatgtgactttgtcacagcccaagatagttaagtgggatcgagacatgtaagcagcatcatggaggtttgg

SEQ ID NO: 36561 - DNA, 486 bp, Homo sapiens
  misc_feature (1)...(486): n = A,T,C or G
gtcgagtnnnnnnattgaacgccngtcggatcgatccgcaattcccgggncgacccacgcgtgcgctgagtcttgagactgaaagatttagccataatgtaaactgcctcaaattgtactttgggcataaaagaacttttttatgcttaccatcttttttttttctttaacagatttgtatttaagaattgtttttaaaaaattttaagatttacacaatgtttctctgtaaatattgccattaaatgtaaataactttaataaaacgtttatagcagttacacagaatttcaatcctagtatatagtacctagtattataggtactataaaccctaattttttttatttaagtacattttgctttttaaagttgatttttttctattgtttttagaaaaaataaaataactggcaaatatatcattgagccaaaaaaaaaaaaaggggggggcgttttaagggaacccttggggggcccaagttn

SEQ ID NO: 36562 - DNA, 402 bp, Homo sapiens
cctgggctggtaatcagcacagagagcttagtcaggactataacccatcagtcagaaaaatatttgcctgggaagagagatactaccgtgagagcttcattcacttttatcgcggtcgctggggtctctgaggtaagtctgttatggcatgatatggtctggatatgtgtcccctccaaatctcatgttgaaatgtattcccgccgggcgcagtggctcacgcctgtaattccagcactttgggaggccgaggcgggcggatcgcgaggtcaggagatcgagaccatcctggctagcacggtgaggccccatctctcctaaaaatacaaagaattggccgggcgtggtggcatgcgcctgtagtcctagctacttgggaggctgaggcgggagaatggtatg

SEQ ID NO: 36563 - DNA, 438 bp, Homo sapiens
tgcaggtgggctatggtatggctgcagggtacaccatcttcatcaccagcttcctgggtgtcctggtcttctcccgctgctttcgggacaccaccatgatcatgattgggatggtctcctttgggtcaggagccctcctcttggcttttgtgaaagagacatacatgttctatattgctcgagccgtcatgctgtttgctctcatccccgtcacaaccatccgatcagctatgtccaaactcataaagggctcctcttatggaaaggtgttcgtcatactgcagctgtccttggctctgaccggcgtggtgacatccaccttgtacaacaagatctaccagctcaccatggacatgtttgtgggctcctgctttgctctctcctcctttctctccttcctggccatcattccaattagcatcgtggcctataaacaag

SEQ ID NO: 36564 - DNA, 435 bp, Homo sapiens
  misc_feature (1)...(435): n = A,T,C or G
acaactgcaagatccgcatccagcgccagctggagatcatgggcaaggaagtctcgggcgaccagatcgaggacatgttcgagcagggtaagtgggacgtgttttccgagaacttgctggccgacgtgaagggcgcgcgggccgccctcaacgagatcgagagccgccaccgcgaactgctgcgcctggagagccgcatccgcgacgtacacgagctcttcttgcagatggcggtgctggtggagaagcaggccgacaccctgaacgtcatcgagctcaacgtacaaaagacggtcgactacaccggccaggccaaggcgcaagtgcggaaggccgtgcagtacgaggagaagaacccctgccggaccctctgctgcttctgctgtccctgcctcaagtagcaggccggcccgggccgccaccgcccatcccaan

SEQ ID NO: 36565 - DNA, 302 bp, Homo sapiens
aaaaataactagaaaaactcaggcccatccattttctcagatctccttgaaaattgaggccttttcgatagtttcgggtcaggtaaaaatggcctcctggcgtaagcttttcaaggttttttggaggctttttgtaaattgtgataggaactttggaccttgaacttacgtatcatgtggagaagagccaatttaacaaactaggaagatgaaaagggaaattgtggccaaaactttgggaaaaggaggttcttaaaatcagtgtttcccctttgtgcacttgtagaaaaaaaaaaaaaagg

SEQ ID NO: 36566 - DNA, 429 bp, Homo sapiens
  misc_feature (1)...(429): n = A,T,C or G
cccacgcgtccgcccacgcgtccgcgagatgcgggtcatggcgccccgaaccctcatcctgctgctctcgggagccctggccctgaccgagacctgggccggctcccactccatgaggtatttctacaccgctgtgtcccggcccggccgcggggagccccacttcatcgcagtgggctacgtggacgacacgcagttcgtgcggttcgacagcgacgccgcgagtccgagaggggagccgcgggcgccgtgggtggagcaggaggggccggagtattgggaccgggagacacagaagtacaagcgccaggcacagactgaccgagtgagcctgcggaacctgcgcggctactacaaccagagcgaggccaggtctcacatcatccaaaggatgtatggctgcgacgtggggcccgacgggcgcctccn

SEQ ID NO: 36567 - DNA, 411 bp, Homo sapiens
acggcgcccggggaggaggagcgctgtgcccaggtggcctcacttgtcatctcaaagtggcgtcgaaccccctgacaggtggacgggaacccccggctggccctccagagaccaggaggcccctggctcaatgatgccacctgcagctgcccaaccctccgcccatggtgcccttgttccacctgccaccgctcatgaacctgtggatcacccagctctgcactggcttgcctgctgctgctgtctcagtttacctgggcagttgcccctggctatccggctgggatgggacttggacttataagcaggcccctcctctggaaagctgtgtcctcgggccaggaggtggcagcctctaccttcctgagacagggacccttttctgtccatcagaggacagctgtatgaagg

SEQ ID NO: 36568 - DNA, 406 bp, Homo sapiens
gaaagtgccagcattccagacttcaaaaataaaaaatctgaagaggcttctcctgttttatatattatgtgaagaatttagatcttatattggtttgcacaagttccctggagaaaaaaattgctctgtgtatatctcttggaaaataagacaatagtatttctcctttgcaatagcagttataacagatgtgaaaatatacttgactctaatatgattatacaaaagagcatggatgcatttcaaatgttagatattgctactataatcaaatgatttcatattgatctttttatcatgatcctacctatcaagcactaaaaagttgaaccattatactttatatctgtaatgatactgattatgaaatgtcccctcaaactcattgcagcagataacttttttg

SEQ ID NO: 36569 - DNA, 400 bp, Homo sapiens
cccacgcgtccgcccacgcgtccgggaacatacctttcagccctacagcctctggagggggttcacccaccagccctagggcctccttggggactgggactgcaaggcctatgacctccctagaggtctctcctaatccagaaccaccacagaagccagtacgaactgctgaggccaaagaaaatgaaaacatccacaatcagaaccctgaagaactttgtacttcccccaccttaatgacatctcaggttgcttcagagcctggagaggcaaagaagatggaagacacggaaaaggataataagcttatctcagctgactcctcggagggccaagaccagcttcaagtctccatggtaccagaaaacaacaacctcacagcacctgaacctcaagaagg

SEQ ID NO: 36570 - DNA, 429 bp, Homo sapiens
  misc_feature (1)...(429): n = A,T,C or G
cggacgcgtgggcggacgcgtggggataagtcgaaactgaagaagacagagacgcaagagaaaaatccactgccttccaaagaaacgattgaacaggagaagcaagcaggcgaatcgtaatgaggcgtgcgccgccaatatgcactgtacattccacaagcattgccttcttattttacttcttttagctgtttaactttgtaagatgcaaagaggttggatcaagtttaaatgactgtgctgcccctttcacatcaaagaactactgacaacgaaggccgcgcctgcctttcccatctgtctatctatctggctggcagggaaggaaagaacttgcatgttggtgaaggaagaagtggggtggaagaagtggggtgggacgacagtgaaatctagagtnaaaccaagctggcccagggtgtctgcagn

SEQ ID NO: 36571 - DNA, 427 bp, Homo sapiens
tatttgatagtaattaaatatgttgtcattgatataaacctgtttggttcagcaaacaaactaaaatgattgtcatagacagtgttttatttttcctgttggtgttgctgatttgtgagcatgctttaagatgaaaaaagcatgaatgataacttccttaaaaaggtgcggcatccaattcaaatattttcgtcctgattttaaagctggttggtgtagtgctattaaaatttcgttcagttaattttccttttgaaaacttgttcgcacgttgtttagggtgcccttacttcagcaaaggagaaggagtaggagagccttataatttttgaggaaaaaaaaacctataacatacaatgtactgtatcaaactattttacatgaatgacacaagtattctgaataaaaaataattgaacattgttag

SEQ ID NO: 36572 - DNA, 426 bp, Homo sapiens
atggcgtgatgtctcacagaaagatctccgctcccagacatgggtccctcggcttcctgcctcggaagcgcagcagcaggcatcgtgggaaggtgaagagcttccctaaggatgacccatccaagccggtccacctcacagccttcctgggatacaaggctggcatgactcacatcgtgcgggaagtcgacaggccgggatccaaggtgaacaagaaggaggtggtggaggctgtgaccattgtagagacaccacccatggtggttgtgggcattgtgggctacgtggaaacccctcgaggcctccggaccttcaagactgtctttgctgagcacatcagtgatgaatgcaagaggcgtttctataagaattggcataaatctaagaagaaggcctttaccaagtactgcaagaaatggcaggatg

SEQ ID NO: 36573 - DNA, 408 bp, Homo sapiens
tctcaggacatctccaccatggcctgggctctgctgctcctcaccctcctcactcagggcacagggtcctgggcccagtctgccctgactcagcctgcctccgtgtctgggtctcctgggcagtcgatcaccatctcctgcactggaaccagcagtgacattggtcgttacaactatgtctcctggtaccaacaacacccaggcaaagcccccaaactcataatttatgaggtcagtaatcggccctcaggggtttctaatcgcttctctggctccaagtctggcaacacggcctccctgaccatctctgggctccaggctgaggacgaggctcattattattgcagttcatatacaaccagaagcactctcgtcttcggaaatggggccaaggtcaccgtcctatgt

SEQ ID NO: 36574 - DNA, 465 bp, Homo sapiens
  misc_feature (1)...(465): n = A,T,C or G
aaattcttcctggccgtcagtccggcagcctcacctcaccatttctagcttgttgaaacccaaaactaatctccaagaaggagaagcttctctcgcagccggagcaggtccctttctagagataggagaagagagagatcgctgtctcgggagagaaatcacaagccgtcccgatccttctctaggtctcgtagtcgatctaggtcaaatgaaaggaaatagaagacagtttgcaagagaagtggtgtacaggaaattacttcatttgacaggagtatgtacagaaaattcaagttttgtttgagacttcataagcttggtgcatttttaagatgttttagctgttcaaatctgtttgtctcttgaaacagagacacaaaggtgtaattctctatggtttgaaatggatcatacgaggcatgtaataccaagaattgttactttacaatgttcccttaagcaaan

SEQ ID NO: 36575 - DNA, 426 bp, Homo sapiens
agcagcagctgctggccatgctggtgaactacgtcaccaaggagctgcgggccgagatccagtatgatgactaggccgcacctccggggaggtggggggcccctttaaatgactctgtgattctgaagaggtggcttgggagttgggagaagcccagcggatgccccctggggaatctccacatcatcagtgtattactagtaatgtcccgctggagaggccaccgctgtgcagtgtcatgttccagaaattactgatgaagcagcatgtgttggtggcatgtgcactggcctgccatgacagccctctgactggccccccagtgaagagtaaaggcctgcctgccgcaagcttcggaggcgtctgctgagtcctctcacccgcatgggtctggggaagtgatcacgctcagccgacggtctgacc

SEQ ID NO: 36576 - DNA, 419 bp, Homo sapiens
  misc_feature (1)...(419): n = A,T,C or G
cggacgcgtgggtcgcccacgcgtccgggatttgttaccagttgttatccaaacctaatgtttaaattacacattgttgaaattaaattacacattgttgacatgcttctctcctgattgtttttattttaaacttgcgataggcatatctatgaaacctttgtaaatttagtttattgctttaccattattttactaggtaaaattagagaacagattttgttctctaatttttaagccttatttacatatgcagaaacagcttaaatattttgactagattagacaaacagttaatagatccaccattaggaatcaatatattatgtcataataaacatcctttttctttcactgaaatttcttttagaaataaacttatttttgcttgttatgttgtgaaacttgacataggatan

SEQ ID NO: 36577 - DNA, 413 bp, Homo sapiens
gaatatgaagatagtggtggatcaaaaacgttcagcgcaaaggattatatggccagaactcctcactgggcattatttggtgccaatgaaagaagctttgatcccaaggacacaagacatcagagaaagaacaaatcaaaggctatttctggatgttgagattatctgatttcaaggtactgaaggacaaaaacttggatggcctcaaaaggttcttgaacaccactctgattctccaaggacgaattacgtaaattatactttcatacaaaggagacgataaggcagtaaacatggagacacgggggacagcgtccacactcagagggcctgggccacagccccgatgtttcttttcagaactcagcccctttcctgattttacttctaagaggaaaattattttggggagg

SEQ ID NO: 36578 - DNA, 480 bp, Homo sapiens
  misc_feature (1)...(480): n = A,T,C or G
tgtgcagtcccnccaattgacgccctaattgacggccctgagtaaccggcncgacccacgcgtgcgttttgcactgaacagaaggagccaaaatcctgttctcatggggcctattttctagtgaggatgacagacaatagtgattaaaatacacgacatgttacagggctgctgtaacaaagtgccagaaactgagtggcttaaacagcaggagtatgttttcccatggatctgggggctctgaggggagtctgttccatgcctcccttccagcttctggtggttgctggccgtccttggtattcttggcttgtgggagcatagcttcagtctctgcctctgctgtctcatggcattcccctgtgtctgtgtatgagtcagggtgctccagagagacagaaccaataggacatagacagatagatgagaggggatttattaggggaattggctcacatgactttggaggctgagaaggcc

SEQ ID NO: 36579 - DNA, 417 bp, Homo sapiens
actggagagagaaagggtgtgttactgaagtgaaatatcaaggttcttgtggtgcttgctgggctttcagtgctgagggggccctggaagcacagctgaagctgaaaacaggaaagctggtgtctctcagtgcccagaacctggtggattgctcaactgaaaaatatggaaacaaaggctgcaatggtggcttcatgacaacggctttccagtacatcattgataacaagggcatcgactcagacgcttcctatccctacaaagccatggatcagaaatgtcaatatgactcaaaatatcgtgctgccacatgttcaaagtacactgaacttccttatggcagagaagatgtcctgaaagaagctgtggccaataaaggcccagtgtctgttggtgtagatgcgcgtcatccttctt

SEQ ID NO: 36580 - DNA, 456 bp, Homo sapiens
  misc_feature (1)...(456): n = A,T,C or G
tcttgttttatgctgtcatcattgtcacggnttgtctgcccattatcttcattctgcaagggaaagggaaaggaagcagggcagtggtgggtgtctgaaacctcagaaacataacgttgaacttttaagggtctcagtccccgttgattaaagaacagatcctagccatcagtgacaaagttaatcaggacccaagtctgcttctgtgatattatctttaagggaggtactgtgccttgttcatacctgtaccccaaattcctaggatggcatctgcccttcagggggcactaaaatgtattattgaaacagcattctgggcttaaataggtgtatgtatgtgttggttgtgactgtactatttctagtatagtgaactacatactgaatatccaagttctcagcacctacttttgtcaaatcttaacattttgccacttcgagatcacattgcca

SEQ ID NO: 36581 - DNA, 428 bp, Homo sapiens
gcgaaaaacagttgatcctagactcattgcccagaggaagactatgaacattccacatgaagaaaaacagtggatcctagactcattgcccagaggaggactatgaacattccacatgaagaaaaacagtggctcctagactcattgcccagaggaagactatgaacattccacatgaagaaaaacagttgatcctagactcattgcccagaggaggactatgaacattccaaatgaagaaaaacagtggctcctagactcattgcccagaggaagactatgaacattccacatgaagaaaaacagtggctcctacactcattgcccagaggaggactatgaacattccaaatgaagaaaaacagtggatcctagactcatcgcccagagaaagactatgaacattttagcacgtctccctcccaggt

SEQ ID NO: 36582 - DNA, 395 bp, Homo sapiens
atttttgtatatcgggtttaccttaagcttctctagtgaggcattctgagcagtggtgatcacatgccagatcgccctgcctatccacaaagtagatgaccaatgcacgctcctcaaacatctttggaggaactacctggccaaaacactggccaggatgcagcaagcagcagcaggggctgacagcaggcttactgccatcaacattgcttgaaatgcctctatgttctgaataaagaaaaaccataattgcttgtggtgaaacgaagcagtcttcatgttaagtagcaatggttatttttattggtagtaactgaacagtgttttgcaatttgtgaaacagtgtattgtgttttgtaaaatgatgtcatgaaatggtgggtccttggaaacct

SEQ ID NO: 36583 - DNA, 400 bp, Homo sapiens
ttagagcactaatagttatggcccacgtactgtttcacccttcacgtgtacaacttcggctgggtgtgacaagaacaggagctgggcttgacaaaggaactcccattacttggctttgaatattaacgtggaggggcgctcaacaatttatgtgcgggcaatgcacctgttccaataagtgataaggggccagctgaggcgctccccactgccagattggccggcctttaccattgcttacgaacgtgaggagggtgcagaacgaacttaccagcaggatggacctaatagaaaaagaagtcgatgttctggaaagctggcttgatttcacaggggagttggagccaccatatcctcttgcaagattgccccaacttaaacgccacatttaaacagctac

SEQ ID NO: 36584 - DNA, 426 bp, Homo sapiens
  misc_feature (1)...(426): n = A,T,C or G
cccacgcgtncgcggacgcgtgggcgagagcaaaggcgagcatgtgccaggattctgcctcccgaagaagggagtgacctccatccttccagtgatgcgggaaggagtcctgactggcagccctgagcagaaggaggaggcagccaaagccttaggcttggtaatccgcctgacctcggctgacgccctgaggccctccgtggtcagcatcactggccctctgatccgcatcctgggggacaggttcagctggaatgtgaaggcggctctgctcgagacactcagcctcttgttggctaaggttgggattgccctgaagcccttcctgccccagctgcagaccactttcaccaaagccctgcaggactccaaccggggggtgcgcctgaaggccgcagatgctctggggaagctcatttccatccc

SEQ ID NO: 36585 - DNA, 494 bp, Homo sapiens
  misc_feature (1)...(494): n = A,T,C or G
gggtgcactgtnactgacggcntgcgcgcggaaccccgggtcgacccacgcgtccgaattaatcataggggaaactaccgacaacttctggaggagatgctgactagttacaggctagctaaagtagagggagaagaaagccctgctgaaccagctgccacagctacttcttcgaacagtgatgctggaaacccagtgacaatgcaggaaagccatactgaatcagaaagtggtcttgctgaattagacagctctaatgaagatgcagggacaaagatgagtggtgaaaaaatatgactttcctttttggtaatatttttgtgatctttgatggtttttaacctaggaagtgtaatgtatgcatttatataactgttttgttatttgaatcttggaaaactagttttattatattcagatagccttgttttttaaaaaggcctttgcatacacctttatgagatagtggtaaattgactatttatagtactatg

SEQ ID NO: 36586 - DNA, 412 bp, Homo sapiens
ggatttaacagaaggtgattgggatttattgggctcctggttccactcaaaggctaatgccagtgttttaggtcttcatttgtcacttggtttggtatttctgccacactttgcacattctgatttctctcttaggagggaatgaaaacaggatcagctttgcctttagaacttaaggaatatgtagttctcttccacctgtgggtgattcgccttgagagattacaaaacaaaacattctagtactactcctacatagctctatggatgaggcccagaaatctgtatttttttaaagctggcaagtgactgcatagccaggtttgggaagtatagttatgtgcacataaggatgttttaatccatgatgtacctaaatgatggtggtcctataagattataatattgtttt

SEQ ID NO: 36587 - DNA, 409 bp, Homo sapiens
cggacgcgtgggcggacgcgtgggccaggcagtgagcgtactttttacaccctgtagaattgtgggctgtagcgttactctgattttctgtctagtatcagagaatgctggtagcttaaaatttttattttaggacttgtactctgaattttcaggaaccgtcaaaggagcagcagcaaattcacatattttcgacttgagaaatgcttgtggtatgtgttttccaaactgccccctatatgtaaagttcagtttaaccactgattgccttgttattactaggttttttgagattaaaaaaaaaaaatccctggtttaaaaccaacaatgatgcctagtgagtatgtgtccacaggccataacagggtaaaagagagacatcgcgcaacccaatgagtagtgaagggac

SEQ ID NO: 36588 - DNA, 552 bp, Homo sapiens
  misc_feature (1)...(552): n = A,T,C or G
ccgcagtgtgcccccaccccacaccaatacggtagtccagatacgtcgatatcgtcgtcgatctcacctcatatccctcatcacgaacacanggggaggnnnntttgagnccatgagaccatgcggaaccgcnccggagatcccgggacgacccacgcgtccgcatggaggcagccaggcccgnnncctcctttcaaaagtcaacccttcacagactcataataatatgtatgcctgggggcaggagtctggagcacctattcttacagatgatgttagtttacaagtgtttatggatcacttgaagaaacttgctgtgtccagtgctgcttgaagtgctaataatgttaaagacacttaagaagatgaaataatattcaaatttcattttttcctttttccatttatctgtggaaaccaacagatattgctctatattttttgtattagtatgggtcgagacaacatatggaaaatgctcacatttgtagattaagctggaattataatgagagcaataagaacaaatttattttgcttaccacagcgttn

SEQ ID NO: 36589 - DNA, 425 bp, Homo sapiens
  misc_feature (1)...(425): n = A,T,C or G
ggaacgtggtcatcgcctgcctggtccagggcttcttcccccaggagccactcagtgtgacctggagcgaaagcggacagggcgtgaccgccagaaacttcccacccagccaggatgcctccggggacctgtacaccacgagcagccagctgaccctgccggccacacagtgcctagccggcaagtccgtgacatgccacgtgaagcactacacgaatcccagccaggatgtgactgtgccctgcccagttccctcaactccacctaccccatctccctcaactccacctaccccatctccctcatgctgccacccccgactgtcactgcaccgaccggccctcgaggacctgctcttaagttcagaagcgaacctcacgtgcacactgaccggcctgagagatgcctcangtgtcaccttcacc

SEQ ID NO: 36590 - DNA, 414 bp, Homo sapiens
cccacacgttcggtcgccgcttgtgctgcagacatgtctctagtgatccctgaaaagttccagcatattttgcgagtactcaacaccaacatcgaagggcggcggaaaatagcctttgccatcactgccattaaaggtgtgggccaaacatatgctcatgtggtgttgaggaaagcacacattgacctcaccaagagggcgggagaactcactgaggatgaagtggaacgtgtgatcaccattatgcagaatccacgccagtacaaaatcccaaactggttcttgaacagacagaaggatgtaaaggatggaaaataccaccaagtcctagccaatggtctggacaacaagctacgtgaagacctggagcgactgaagaagattccggcccatagagggctgcgtcacttctgg

SEQ ID NO: 36591 - DNA, 395 bp, Homo sapiens
  misc_feature (1)...(395): n = A,T,C or G
tgtttagcagaactcattctatccccaatcagctccttttccgttctgttctgctgggagttctagaaccacttcctgctacaggaggggtctcatgtcctgctggcttccagcttcaggcaccagcatccaccttggctctgccagtggatcccctgcggtcaggctgggcagccccagagagaggatgtggaaagcactttttggctgacttcatctggggttggcaacaggacagagttcacaggaggccagtgggcgggccatgagggacagggtcttttttcatttcttcctcagctgggtactcagggttcatctgtccatggcctttctaataaactgttgagttgaagcacgctcancnnnnnnnggnaaaaaaaaaaaaaaaaggg

SEQ ID NO: 36592 - DNA, 397 bp, Homo sapiens
  misc_feature (1)...(397): n = A,T,C or G
gaaggagagatgcacattctggagccagaaagtctgggttccagcccagggcccaccactagcagctatgaagctctgggccagttacttgagttcttggtttcctcagctgttaaaaggaaacacaaataatacacccctcataggattactgtcataaatgcaaaacattagcacaacgcctgttaaaataattgcccaatacactttagctatattttcattactatcattagtattatcttctactcttatcaggatttgtgaagatcactgtgtcaaatggatgggaaattttattttaatataaacagtaaaatagcattgttttcacttgcagctttgaaatagtgggggccatatatggttgtttccttttttaggtggacacagaggn

SEQ ID NO: 36593 - DNA, 404 bp, Homo sapiens
cactcatgccttgcctaattgttcacaatggtggaaagcttcatgtaatatgatcaggacccacctccagttcttctgaaagtgtgacagtgtccagccggttctgcagcactaggggagggggcagatggtggttgcatgggcttcctgggtctccactctccgtctggcctaaaggtgatgtatttggtgtttggccctgcagtccccactcttgaggcttaaggcgcatgtggcacaccactccttccagcagtagtcgctttactgttacctgtttaggcctagaagttttccctcatctgtaaatgtgatttaaaatctaagccatgaatatgctttatttattaaaagagttatgcggaaaaaaaaaaaaaaaaaggggcggccgttctaaaggatcc

SEQ ID NO: 36594 - DNA, 414 bp, Homo sapiens
cggacgcgtgggaaaaatacctagatttttggagaacttattacatacatagaaacatgaatatggtttaccactgtgtgtgtgtaggatgttagaattatctgccctccatctttaggtgctttttcttaaatgtggttctacttatactgatatttttaatttccatcttccatgcaacctcagagtgaataaaccccttaaatttggtgctggttcgaaaaagtctaaagggtttattaggggttgtttttcgcaaatattacatcaatccttaaagcaacaagattaattctctgcttaaaatatttgggaagataggtaaggaggagggggttttaaaatataaaagcaagtttttctattttaaggtgcatatttgtaacattacaggggatgaagtaaaatgtaatt

SEQ ID NO: 36595 - DNA, 408 bp, Homo sapiens
gctatgtgaactgactatttcctatgctggagctttgatttttaactaaacacaaaccagcagattgtctgctctgccatcccaaaaaacaaaacacagtaacgcttttctaaagtgcttctaggactttaaaacatagtggtgtatccaaaattctttatttcagaatgcaacaatagattccattaatatagactcaagatcaaaacagcatacctgctaagctaagatagatggtgctgattccactgggttttgatcaatacaataacaaacctttttgctatgacatactctgaattttgttgattgaggagagggagtgtgggtgctgctgagcgcagagactccgagtgggatcgcggctccatcctggcctcgcttgccaccttccagcagatggggatg

SEQ ID NO: 36596 - DNA, 430 bp, Homo sapiens
cttacagttctgttggtatcacagaagacaaggcacagtataaagtgaggaattttatatttaaagaactttttggttggatcaaaacataatatgagcatccaggattagaattccactacatttcacttggtgggagttaagctagaatgggctgtgtgataagaaacagatgccttacagatgtgcctaggcgtactggtcacctaatggcttactctgttgtctggatctgaagactagaagtagactaggacactaactgggttccatgtgattgccctttcatatgatcttgtaagacgatttttttcctcccaagtcttttttaaagaaagtatactgtattttaccaaccccctctcttttcttttagctcctctgtggagaattagacgaacttgagttacaagatttcgatgttttgttg

SEQ ID NO: 36597 - DNA, 429 bp, Homo sapiens
  misc_feature (1)...(429): n = A,T,C or G
ggacgtggcgtgccagcccggatcggccctctccctgcctgttgggaagttcggcggcgctgttcgcggtctgcacccagggcaggagggatgagagagacaagaaaaaaaaaccgcctgttacagggaaatcttatcaatcatgcggtcgacacgtatttcttgagccccctgctctgcgctaggcgctgcactagttgatgaatccgacacggatcctgcccttgaacttgcagaacctctaggaagaggttaaattgagcaataaaggaaaggcagccctgggaaaattgtatcgaggccactggctgacagaggggaaaaacaatgagaacttgtgttgctttgtgttttgtttttaatttcattggaaccgagatgcctaggtagagaagcggnggagaagctaacccaaagccccaagcccgg

SEQ ID NO: 36598 - DNA, 427 bp, Homo sapiens
  misc_feature (1)...(427): n = A,T,C or G
ccgccatcttccagtaattcgccaaaatgacgaacacaaagggaaagaggagaggcacccgatatatgttctctaggccttttagaaaacatggagttgttcctttggccacatatatgcgaatctataagaaaggtgatattgtagacatcaagggaatgggtactgttcaaaaaggaatgccccacaagtgttaccatggcaaaactggaagagtctacaatgttacccagcatgctgttggcattgttgtaaacaaacaagttaagggcaagattcttgccaagagaattaatgtgcgtattgagcacattaagcactctaagagccgagatagcttcctgaaacgtgtgaaggagaatgatcagaaaaagaaagaagccaaagagaaaggtacctgggttcaactaaagcgccagtctgctcn

SEQ ID NO: 36599 - DNA, 488 bp, Homo sapiens
  misc_feature (1)...(488): n = A,T,C or G
cgtgacactgagactgacggacntgcgcacggaaccccgggtcgacccacgcgtccgcggacgcgtgggcttctaaactgcattcatttttatagtaagatgtttaagaaattaaacagtcttagggagagtttatgactgtattcaaaaagatttttaaattagcttgttatcccttcatgtgataactaatctcaaatactttttcgatacctcagagcattattttcataatgactgtgttcacaatctttttaggttaactcgttttctctttgtgattaacgagaaacactttgatattctgatagagtggccttcattttagtatttttcaagaccacttttcaactactcactttaggataagttttatgtaaaatgtgcatcattatcctgaattatttcagttaagcatgttagttggcggcataagagaaaactcaatcagatagtgctgaagacaggactgtggagacaccttacan

SEQ ID NO: 36600 - DNA, 419 bp, Homo sapiens
tttttgtatttttggtatagatggggattcatcattttgaccaggctgggctcaaactcttgacctcagctgatgcgcctgccttggcctcccaaactgctgagattacagatgtgagccaccgcaccctacctcattttctgtaacaaagctaatcttgaacactgttgatgttcttgagggaagcatattgggctttaggctgtagggcaagtttatacatcttaattatggtggaattcctatgtagagtctaaaaagccaggtacttggtgctacagtcagtctccctgcatagggttaaggcgcaaactacctgcagtgaggaggtactgcttgtagcatatagagcctctccctagctttggttatggaggctttgaggttttgcaaacctgaccaaattaagccataagatg

SEQ ID NO: 36601 - DNA, 425 bp, Homo sapiens
  misc_feature (1)...(425): n = A,T,C or G
gaaaatgggactggaagatcggcgtgcttactactaaccagtaaccaaacctcaaggttatgaaggccttctgcgtgccacttcgaatggatgtttatagtgatctggcttctgccctttctccaagggcttcttcactcctccccctcccgggggagtgttttgctgagggtacaccctgaagaaacttggactagcagcctttcaacagccaaggtgcgctgctgcaccagggtgatgacaggctgtgaaatacagtaatggcactgtttttattttaaaagacacataaacgtacacattccatagcattgttgcctgtgtaacagtcaccttaaggcttctaagaaagctttccctccctgggccatggttatttttagaattgttaaatagtaatcatccgttgaggatggattttatan

SEQ ID NO: 36602 - DNA, 490 bp, Homo sapiens
acggccactgatcactgcggacctgcgcacggaaccccgggtcgacccacgcgtccgcttttccagctccatgatggttctgcaggtttctgcggccccccggacagtggctctgacggcgttactgatggtgctgctcacatctgtggtccagggcagggccactccagagaattaccttttccagggacggcaggaatgctacgcgtttaatgggacacagcgcttcctggagagatacatctacaaccgggaggagttcgcgcgcttcgacagcgacgtgggggagttccgggcggtgacggagctggggcggcctgctgcggagtactggaacagccagaaggacatcctggaggagaagcgggcagtgccggacaggatgtgcaaacacaactacgagctgggcgggcccatgaccctgcagcgccgagtccagcctagggtgaatgtttccccctccaagaaggggcccttgcagcaccacaac

SEQ ID NO: 36603 - DNA, 395 bp, Homo sapiens
atgcccgaggccgttccatcgccattgcccgctgctactcactgaagaaccggcaccaggatgtcatgccctatgacagtaaccgtgtggtgctgcgctcaggcaaggatgactacatcaatgccagctgcgtggaggggctctccccatactgccccccgctagtggcaacccaggccccactgcctggcacagctgctgacttctggctcatggtccatgagcagaaagtgtcagtcattgtcatgctggtttctgaggctgagatggagaagcaaaaagtggcacgctacttccccaccgagaggggccagcccatggtgcacggtgccctgagcctggcattgagcagcgtccgcagcaccgaaacccatgtggagcgcgtgctgagcctg

SEQ ID NO: 36604 - DNA, 561 bp, Homo sapiens
  misc_feature (1)...(561): n = A,T,C or G
caccatctcgcaatgtactacttcgtagattgtctagtgctaaagagtagttaacttctctccagtggtcaccaacaaannnnaagcggatgagtctagacntgccggaancccgggncgacccacgcgtccgcgtaatgcagggttatcttcacacattctgatcttctctgtgacaggcatctccagcactgaggcacctctgactcacagttacttatggagcaccaaagcatttggataaagaccgttataggaaatgggggggaaatggctaaaagagaacaattcgtttacaattacaagatattagctaattgtgccaggggctgttatatacatatatacacaaccaaggtgtgatctgaatttaatccacatttggtgttgcagatgagttgtaaagccaactgaaagagttccttcaagaagttcctctgataggaagctagaagtgtagaatgaagttttacttgacagaaggacctttacatggcagctaacagtgctttttgctgaccaggattggtttatatgattaaattaatatttgcttaataa

SEQ ID NO: 36605 - DNA, 383 bp, Homo sapiens
ggaactgctgtgtcctcatgtggcgcagcctcaaactggcatccaggcactgggcccgtgcagagaaggcacctgcagagagcagggcagcccggcgcaggggcatgcgcctagaatcccagctactcggaaggccaaggcaggaggaccgcttgagtccagggattcaaggccaacctgggcaatagagcgagaccctgtctcttaaaaaacgatgatgatgaacacagaggacggggcactgtgctgggagccagggggcctgggaggagccgagaccagccttttacctcggggttttgaggccaacagggacgacagagacagtttctagttagagccttggctccatttttggatgatttagccccgagctcctgagt

SEQ ID NO: 36606 - DNA, 427 bp, Homo sapiens
  misc_feature (1)...(427): n = A,T,C or G
cggacgcgtgggcggacgcgtgggtccgctcgtcaagctgtccacatccctggcctcaacccgccacatcaccctgacctgcttacgcccagattttcttcaatcacatctgaataaatcacttgaagaaagcttatagcttcattgcaccatgtgtggcatttgggcgctgataggcagagatgattgcctttctgttcagcgtctgagtgctatgaagattgcacacagaggtccagatgcattccgttttgagaatgtcaatggatacaccaactgctgctttggatttcaccggttggcggcagttgacccgctgtttggaatgcacccaattcaagtgaagaaatatccgcatttgtggctctgttaccatggtgaaatctacgaccataacaagatgcagcagccttgtggatttcaaacn

SEQ ID NO: 36607 - DNA, 417 bp, Homo sapiens
ccgctgtcccaagggttggtctcgcgctttcggctgcgagctctctgtggtgctggcagcgacatgtggcgcctcccgggactcctgggccgagctcttccccgtacactgggacctagcctctggagggtgactcctaagtccaccagcccagatgggcctcagactacctcctccactttgctggttcctgtgcctaacctcgacaggtcaggtccccatggcccaggcacgagcgggggtccaaggtcccatggatggaaggatgccttccaatggatgtcttcccgtgtctccccgaacaccctatgggatgccatatcttggggcactctggccgtgctggccctgcagctggcaaggcagatccacttccaggcatccctgccagcaggacctcagcgggtagaacactgg

SEQ ID NO: 36608 - DNA, 433 bp, Homo sapiens
  misc_feature (1)...(433): n = A,T,C or G
aaacacaagggacgtgggacagttcgtactgtgactaaaacagtttccaatgactctttctttaacttttttgcccctcctgaagttcctgagagtggagatctggatgatgatgctgaagctatccttgctgcagacttcgaaattggtcactttttacgtgagcgtataatcccaagatcagtgttatattttactggagaagctattgaagatgatgatgatgattatgatgaagaaggtgaagaagcggatgaggtaatgtttaccaaatgagcaaataattctctgtggttaacacattgagaagcaaattgaatgacttatgtattcctttgctataatcattctgtgatttgggataaaaacattntggaaaacatgattttagaattctacagccaaacaatgtatgtataaggtttcaataaan

SEQ ID NO: 36609 - DNA, 421 bp, Homo sapiens
aaagaccactacaatctaatggtgatctaaaataacttttttgggctgggtgcagtggctcatgcctataatcttagcactttgggaggccaaggtaggaggattgcttgaagctaggagtttgagaccagcctgggcaacagggtaaggtcctgtctctacaagatcaaaaacttagccgggtatggtggtgcatgtgtgcctgtagtccaagctacttgaaggctgagacaggaggatcggttgagcccaggaggttgtggctgcagtgagctgtgatgtgcccttatgctatagcctgggcaagagcgtgagaccctgtctcaaagaagaaaaaaagagaaaaataactcttttgaacaaacagacaaattagctagtagtatggagatgtataccctctattacacacataaaaccg

SEQ ID NO: 36610 - DNA, 416 bp, Homo sapiens
agcttattcaagaccaatttgtggacataagtttttcatcccaagttgtaaatacaaacatgcagtcagtacagctgaatacagaagatactgtaaatactaaatctgtgaataatactgatgctactggtcttatacagggagtgaagtcagtagaaattgagaaggacgctcagttaaaacaattccttacaccaaaaactgaacaattaaaaccagaacgtgtcacatctcaggtatctaatttgaagaaaaaaagaaactacagcagattctcaaaccacaacatctaagtcattacagaatcagtctctgaaagaaaatcagaagaagccatttgtgggaagttgggttaaaggcttaataagcaggggtgcttcttttatgccactctgtgtttcagctcataatagaaa

SEQ ID NO: 36611 - DNA, 385 bp, Homo sapiens
tgtgatcagaacctccaaatactgccatgagaaactagagggcaggtcttcataaaagccctttgaacccccttcctgccctgtgttaggagatagggatattggcccctcactgcagctgccagcacttggtcagtcactctcagccatagcactttgttcactgtcctgtgtcagagcactgagctccacccttttctgagagttattacagccagaaagtgtgggctgaagatggttggtttcatgtttttgtattatgtatctttttgtatgggaaagactatattttgtacttaaccagatatatttttaccccagatggggatattctttgtaaaaaatgaaaataaagtttttttaatggaaaaaaaaaaaaaaaagg

SEQ ID NO: 36612 - DNA, 378 bp, Homo sapiens
ttagtacatatgttaaaccaatgtgtaacttaacaagtattttgaataattagtgttgagggggatgcggaatccaccataatcagtgtttttaggatgtatggaggtttccagctcttctgattaatacagaattccttcatggactacacttgattttagttaaaaggctgagcagcgatagactcttcatggaaatagattttttaggagacatttaatggtgggaaagaaattttccaaaaggctagagaaaatagagagcctttgagtctagttttaaggtcctgttttactcagtccctgtttttcttgatcctagtcttagacccagaaagacatttctagaaatcttttagtaagaaaatactggccaat

SEQ ID NO: 36613 - DNA, 476 bp, Homo sapiens
  misc_feature (1)...(476): n = A,T,C or G
nattgaacgntgtcggaactgatcggcattcccgggccgacccacgcgtccgagaaaaggactccctggccaggcgcggtgacttacgcctgtaatctcagcactttgggaggccagggcaggcagatcacgaggtcaggagttcgagaccatcctggccaacatggtgaagccccgtctctgctgagaatataaaaattagctgggtgtggtggcaggagcctgtaatcccagctacacgggaggctgaggcacgagaatcacttgaactcgggagatggaggtttcggtgagccgggatcacgccactgcgctccagcctggcaacagagcgagacttcatctcaaaaaaaaaaaaaatggtaaaaaaaaaagggtctcctttaaagggggaaggaaaaaccataaaattttgagcgggggccggtatataaaaataaagcgtttctcaaaggctgttttttgttttgtggttt

SEQ ID NO: 36614 - DNA, 437 bp, Homo sapiens
taagatgaaaaactggttttgaagcagtcaactgcctaaatttactttttcttaaagttagagctgattttgacaatagagctttagcagttggtgcgtgagtgaaatcttcagaggcttttttagtgttttgagagagtcttttaagttaatcttccatgacggggtctgcatttgggctgcctgtcaattaagcataatactgacacaatggtgtaactccttagcccatcaaaaaaaaaaacttccgactgcattactacactgtagtatagtattagtacattagttcaaaatatagttctatgctaacattaactctttccaggctgcataaacctagttagatgctctcctgactttcccatttaatttgaagctaatttcttttgggtgggttaaggcattttttacatttcatgaaaggcttcaaatga

SEQ ID NO: 36615 - DNA, 475 bp, Homo sapiens
  misc_feature (1)...(475): n = A,T,C or G
tcagcagcctaaaactgttgtgtttttcttatggtttaaaaaacgccatgtcattgataactccctttctcccttcccttctcccggnctgctgatcactctttcatgcctgtgtatccagggtgctctgtttccccaccgttcccaggtgtacgaggcagagggccgggacagctttcctctcagtcattgttcaccccacttgaaaattcagacaagaaaactttgcttaaaagatttcatgtgtgggaaccacagttcctggctgcctttctcctgtgtatgtgtaaattccttaataaatattgcagggaaggacaaaaaaaaaaaaaaggggcggccgttttaaagaatccttgggggggccaaagttaacgcgggcatgcaaagtaatagttctttccttatagggagcgatttataccaacctggggattttgaaaggacccttcttgtgggggacaataaggaacaa

SEQ ID NO: 36616 - DNA, 423 bp, Homo sapiens
cccacgcgtccggtggggatacttcttcactgcctcaaaccaaggatcaatgaaatgcacataattaactggttccatcaagactgtgcacccaggccttacagtccaacctttttctgtgtctggctaatatttaaaactagaaaaactattcctaatcaacatggagtggagagtttattcactgtcttatctgcagaaatttgctgtcaatatataacccgcctgcagtggaaagtgtatagtgttttgtaataaatggcctgatgctaatgtgtaaatggcaaaaaaaaaaaaaaggggcgccccttttaaaggacccttggggggcccaaattttacgcgggaatgcgaggtaaaaattttttccttatggggagggaaataaaaacctgcttgggaattttggagagggaccctttc

SEQ ID NO: 36617 - DNA, 403 bp, Homo sapiens
tgatatctgcatctaggggctcggagaggtgctcggattctcgtagctgtgccgggagagcgtcgctcgcgtgcgggcgcgtgagacccatcccggggacccgtctccgcgggggcagctggagggcggcggggctcctggcgccggtggcgcacctgggcaggtgtgccatccatgtccccgattctgggatccgaggccatggcttggagtggcccagacccgaacttcgctcctgtgcccaaacttggaactctggaaatgtggcttcgctcactggcgccttgagcttgggcgactgccgggtccgcgaaacccgacccctgcagagctgactccgggactattttagtttctaacgtcaacttgcccgattcaagagggtttgcgcaaaaaacgtagc

SEQ ID NO: 36618 - DNA, 407 bp, Homo sapiens
  misc_feature (1)...(407): n = A,T,C or G
cggacgcgtgggttccacggtttcctgcctccctgagaccctgagtcctgccatctaactgtgatcattgccctatccgaatatcttcctgtgatctgccatcagtggctcttttttcctgcttccatgggcctttctggtggcagtctcaaactgagaagccacagttgccttatttttgaggctgttctgcccagagctcggctgaaccagcctttagtgcctaccattatcttatccgtctcttcccgtccctgatgacaaagatcttgccttacagactttacaggcttggctttgagattctgtaactgcagacttcattagcacacagattcactttaatttcttaattttttttttaaatacaaggagggggctattaacacccagtacagacatatccn

SEQ ID NO: 36619 - DNA, 423 bp, Homo sapiens
cgaggtcaggagttcgagaccagcttggccaacatggtgaagctctgtctctactaaaaatacaaaaattagccaggtgtggtggcaaataagacagcccatcaagtattcatttgaactttgctgacattatctcaatgtatccaactttagcatccagaaggaagagagaacctgttaattatgccatttttaagtctcacagttcccagtgatgtatattcagagtaaactcaccaatatttgtcataattttgaggttgttatttaaagttggagatgagtaggtgtaggaaggagaaatgtggaagtttgggcagcagtaaatcaagatagattcatgcagtctccaggaattcgtttgccctaaggcagcgtcatagcaagggagggagagtccaggccttggagtctaataaacgt

SEQ ID NO: 36620 - DNA, 429 bp, Homo sapiens
  misc_feature (1)...(429): n = A,T,C or G
aagggtcctcgttttgataatacttcagaatagggaactcatgtgaatactactatgtagaaataaaacctagaccttgagcgaacatctgtatattggttgaaaacgatagtggtaaccattgatcccccttcatttgatgtttggaaaattccagtaattatcatttttgccacgaatatggataccacatagtactttggtgttacctgcttttgaaaaataaagtctttggttcacccggagnaaaaaaaaaaaaaaagaaacaaaaaaaaaaaaaggggggggggcctttaaaaaaacccttgggggggcccaattttaccgggggggggaaaaataatttttttttttttagaggggggaataaaaaaaacacctggggttttttggaaaaaaacctttttttgtggggggaaaaaaaaggaa

SEQ ID NO: 36621 - DNA, 447 bp, Homo sapiens
cctccggtggccaaaaagagttaatggttttttaaggataaaaaagtatttgctttcagaggacataagggtccagagctttaaaagaagtggctctttgtagaccgttggacacaactcttctgtgatttcccgggacagcattttgactcagttgaacccatttctgtggctcattaactttaacaacctgagcaggaccaggacaggccaataatttgaccatagttcaaattaacattctttaaatatttgttcaacatttatttagaggaacagcaatgctgtgaagaagaaaaactccagatgacattatttagattctgctctgttttccagagaaatttagttctgacccgcacttgcagactccaactagaaaaacaaacaaacaagcaaacaacaatcagaggtgattaactggacccattctcgattaactggacc

SEQ ID NO: 36622 - DNA, 377 bp, Homo sapiens
ctaaaaccagctctttagagtcctcggcagtaatatctgctttttttgaatgcttacgttttataatgcagcaaaacttaggtgaggaagagattgaacagatgctcgtcaatgatcagttgatcccttttattgatgcagttctcaaagacccaggattgcaacatgggcagctatttaaccatttagcagaaactctaagttcctgggaagccaaagcagacacggaaaaagatgaaaaaacagctcacaacttggagaacgtactgatacatttctgggaaagactgtcagagatctgtgttgcgaaaatcagtgagccagaagctgatgttgagtccgtttacaggtgcttcagaagccgaagagctcattga

SEQ ID NO: 36623 - DNA, 438 bp, Homo sapiens
  misc_feature (1)...(438): n = A,T,C or G
aagacatcacaatcccattattcaaagcgcgtatggagtggaaacgcttgtatggtttcaccaaggctggtgaattaccatatctccgtcaagtgcagtaaccagttcaagttggaagtgtgtcttttgaatgcaaaaaacaaagtcgtggacaaccaggctgggacccaaggccagctgaaggtgctgggtgccaacctctggtggccgtacctgatgcacgaacaccccgcctacctgtactcgtgggaggatggtgattgctcacaccaaagccttggacccctcccagcctgtgacctttgtgaccaactccacctacacagcaaacaagggggctctgtatgtggatgtgatccgagtgaacagctactactcttggtatcgcaactacgggcacctggagttgattcagctgcagctggccgaccagtttgn

SEQ ID NO: 36624 - DNA, 430 bp, Homo sapiens
  misc_feature (1)...(430): n = A,T,C or G
atacgatccatgtactgtcatgtttttcttcaggaacaagcacatcatgattgacttggggactggcaacaacaacaagattaactgggccatggaggacaagcaggagatggtggacatcatcgagacggtgtaccgcggggcccgcaaaggccgcggcctggtggtgtcccccaaggactactccaccaagtaccgctactgaggcgccctcagtctgcgcggataaatgtcgtggagccctttttgtatggaaacgttttaagctatttaaagcctttggaaaatacaggaagctccagggctggagcacctctgagatggaattgataacatggtcttaactcaccgaaataaacaagcacgtggtgagaaaaaaaannnnnannnntttttttataaaaaanntttaagaaaaaaagaggggggg

SEQ ID NO: 36625 - DNA, 391 bp, Homo sapiens
cactatcatggccgtgcagtttgacgggggcgtggttctgggggcggactccagaacaaccactgggtgagctcaggacagatttgtgaaaggtcttcccatcttccttttcctttcctgcctgccagcccaccctgcctgcctccacagaccactgtgggaagagaggtttcttctctctctggagataaagatttgtcccaacttttgttactttcagttcccctcactcgttagtggaatccttacaaaagtctgttctccagcccgcttcagtttggatgagaataagcaatactggaggccaggcacggaggctcacgcctgtaatcccagtactttgggaggccgaggcgggtggatcacctgaggtcaggagttcgagaccacg

SEQ ID NO: 36626 - DNA, 408 bp, Homo sapiens
caacagcttcgctcgatacgactttgaagacgatgaagaaagcactatctatgctcctagaaggaaaggacagctgtctgcagacatctgtatggaaacaataggagaggaaatttcagagatgcgtcagatgaagaagggtgtatttcagcgagtagtggcaatttttatccactattgtgatgtcaatggagagccagttgaagatgactacatttaattggtccctcctcctttccagctattttgtcagaaagcaagtagggccatccagctgccagagtgctccacagggacttgaggcatgcagttgggaggtcctggctcggtttgctatatagggaatatataaggaacatcgaaattgtatacaaagatttgtacataaaaaatatacaaagacgcttg

SEQ ID NO: 36627 - DNA, 402 bp, Homo sapiens
agaacattgacagagtaacattttagcagggaaagaagaatcctacagggtcatgttcccttctcctgtggagtggcatgaagaaggtgtatggccccaggtatggccatattactgaccctctacagagagggcaaaggaactgccagtatggtattgcaggataaaggcaggtggttacccacattacctgcaaggctttgatctttcttctgccatttccacattggacatctctgctgaggagagaaaatgaaccactcttttcctttgtataatgttgttttattcttcagacagaagagaggagttatacagctctgcagacatcccattcctgtatggggactgtgtttgcctcttagaggttcccaggccactagaggagataaagggaaacag

SEQ ID NO: 36628 - DNA, 416 bp, Homo sapiens
cggacgcgtgggctggagatctgtgtgccttgccttccttcagcaggaccgtctaggtgcgcagccacctatggatgcgtcccagccagccccgtcgctctcgtccatcctcagagacaaagaagagggcagggagtttgggcttggttttgaactttcctttcaatgtagcaaagcattcctagttaaccagagccttggaatctactgcctgctggccaggctttaaaatgaaaagtgttttaatgctgccataaaagggaggcgggggggaggaagggaaaataaaggcatctttccaagtactcatctaatttaattgtcaaaagattgataggccatgaattacttctccatctcactaagggttaaaggcgtgcaaccccccactggctgtgtcccctgccaccgaagtg

SEQ ID NO: 36629 - DNA, 190 bp, Homo sapiens
cccacgcgtccgcccacgcgtccgacccgccttaagagactggatcgcacacctttgcaacagatgtgttctgattctctgaacctacaaaatagttatacatagtggaataaagaaggtaaaccatctgttatgtctttttttttcttttccaataaacttttattttggactaaaaaaaaaaaaaagg

SEQ ID NO: 36630 - DNA, 395 bp, Homo sapiens
catttttatataaatggagaagccatatctgaagtttttcattaatgtaagagtttccaaagattaaaggagattaactgtgtataggaacctatagcttctgctttaagtggaagtacgtttttgattactgaatgaatgctaggcaaacacgattgttacttactccagggggcctcctgtggcctaagtgttcagatcagatgacacacatctagctgaggccttgaggctccgcgacaagaaagcatatccaagttaccaaattagttacaacaaccaggtggatacttttctaaactatcggagcttagcttttgaataaaaaatactgtcttaccaaaagtattttacatgttcttgataatgagactgtcattttcactttaaaaggc

SEQ ID NO: 36631 - DNA, 417 bp, Homo sapiens
tcctttcggagtcttacagatatttggagtattaatttgaggacctcatcggcctggcacaggaatttttgagtgtaggatattttgcataaaatagtttattctgggatgatcatcttggcttgagtagttgcagcctggattcctacctggatatgttccttacaacaaacaatggttgagaaacttatcttggaagatgactgatgaaagcgtccctgagctttttttgtacttgtattgtgggcagtcaccaggttactttaaccaaaaacttcggtgggtcttcatagattggaagagtttctcattcatctcttccctgtcattcattcccttgcaacccttccctccatgtctccattgagacttcctttttttttttgagagggagtcttcctctgtcgcccaggctgg

SEQ ID NO: 36632 - DNA, 433 bp, Homo sapiens
gcgctcatttcccttttcaggtgatgagacaaaccatgcttctgccacatctacacaggactttctggatcaagtgacttctcagaagaaagctgaggcccagcctgtccaccaagcttaccaaatgagctcctttgaacagcccttccgtgctccctatcatggatcaagagctggaatagctactcaatttagcactgccaatggacaggtgaaccttcggggaccagggacaagtgctgaattttcagaatttcccttggtgaatgtaaatgataatagagctgggatgacatcttcacctgatgccacaactggccagacttttggctaaaaaaaaaaaaaaggggaaataatactggccctttaaaacagattaatcaagaggggggttactctgtgtaaagggagggctgtacagatttaagagcaa

SEQ ID NO: 36633 - DNA, 409 bp, Homo sapiens
taaaaacaatggtgtgttgtttgaaaaccagctgcttcaaattggacttaagtctgaatttcggcagaatttaggtcggatgtttatcttttatggtaataagacctccacgcagttcctaaactttaccccaacactaatctgttcagacgaccttcagcctaacctgaacctgcagaccaagcccgtggacccgaccgtggaggggggcgcgcaggtgcagcaggtggtcaacatagagtgcgtgtccgacttcacggaggcgccagtcctcaacattcagttcaggtatgggggcaccttccagaacgtgtctgtgcagctgcccatcactctcaacaaattcttccagccgacagaaatggcttctcaggatttctttcaacgttggaagcagttgagcaatccc

SEQ ID NO: 36634 - DNA, 404 bp, Homo sapiens
ctggagcaagagggggaagaggtgaccagacactgtccactgtagtgccaagacggcagcaggactggggctgatagcccaccccgcccccactgcagctcccacaaagcactctaagggagatggggctgaggacagctcaaaaaggagaggacaggcctggcaggggcccactggtgcccagcaccaaggcgagctccgggctcagaccaactccaaggtcagctggccacaggcccaggcctcctctgaagcagggaccagagggagccaggcagctgtgtacagcgagaagggatccggatgggggagctctgtacagagggctggcgattagaaaaatttcttttgtaaagtacaagttgggggtggggtgggtgctggctgcaaaaatttctggcttt

SEQ ID NO: 36635 - DNA, 399 bp, Homo sapiens
tggaagcactttgagtgttagcatggagacataaaactgaatatttaattgacaattggtcatgcacctgcatttcttaaaacctgcattacattattttcttttctgagtgtccaggagattccgactttggtgtagggaacgcttgatgatacaaatgtctgcgggttgctgctgcactgtaaagcttgacagagcctataataaacgcatcgaaattatcttacattttattaaacacacagatgtaaaactttttcctttttagcttatcgtactgcataaaacctatcatgtggaattcgaaatgttttttactcgatatatacaagattatcttaaaatgcaaaaaaaaaaagagggggcggccgctttatagctcacctggggcccaggttt

SEQ ID NO: 36636 - DNA, 441 bp, Homo sapiens
  misc_feature (1)...(441): n = A,T,C or G
ggcaaagtcctgctggtctctctctttaatacttctcaaatctgtccctttagtttcatccctctgttactgtaaagggtatctgatcaagccaacaacagtgacggaatgcctccatacatctgcagaatcctactggatgtccacttggatgtcctgaagccacctgaaactcagcatatctacgaatgatcaaatgggatgccagcactcagttatccaagcaagaaatatgctccatgcttgactctttaccctcactaacaaaactgggcaaagncctgctggtctctctctttaatacttctcaaatctgtccctttagtttcatccctctgttactgttctcattcagattcttattacatctcaccaaagccactgcagcacattcttaactgtgtccaagtggtaataattaaaaacagcttactgtctttn

SEQ ID NO: 36637 - DNA, 418 bp, Homo sapiens
cggacgcgtggtgcattttatgtttggattgtgctgtaataagagcctcttccttccctcagaggatgtggctgggcttctatcctagagatggagtagaaggcacaactggtttgatagttactattttctgacctgtttgctgaagtgatttgcgaattgactttcctagggtgttgcctgagtcctttgaaatctccttctgacatctttcccttctgttgtgaaatatgttaagccacaggccaaactgctataagatcgaagtttgtttttttctcacctaataatagagaggtaatcagatggtctagggcagatttaactctacaaggttatcaggaactttgtttccttctgtcttattcagccattcccagtatgttttcttacccataagatcaaagcagactcatca

SEQ ID NO: 36638 - DNA, 424 bp, Homo sapiens
aaactggaaggctgccatggctagcccagccgcctcctcggtgcgaccaccgaggcccaagagagagccgcagacgctcgtcatccccaagaatgcggcggaggagcagaagctcaagctggagcggctcatgaagaacccggacaaagcagttccaattccagagaaaatgagtgaatgggcacctcgacctcccccagaatttgtccgagatgtcatgggttcaagtgctggggccggcagtggagagttccacgtgtacagacatctgcgccggagagaatatcagcgacaggactacatggatgccatggctgagaagcaaaaattggatgcagagtttcagaaaagactggaaaagaataaaattgctgcagaggagcagaccgcaaagcgccggaagatgcggacccggtcagcccat

SEQ ID NO: 36639 - DNA, 460 bp, Homo sapiens
  misc_feature (1)...(460): n = A,T,C or G
aaagagtgagcaagaagccaaagaaagccggcctgtcagaggaggacgacagccttgtggacgtgtactatcgggagggaaaagaggaggcagaagagacgaatgtgctgcccaaggagaagcaaaccaagccagcagaagcgccccggctgcagctgtcttcaggcttcgcttggaatgtgggactagactctctgaccccggccttgccacctctagcagagagctcagacagcgaggaggatgagaagccacaccaagccacgataaagaaaagcaagaaagaaagggagttggagaagcagaaggcagagaaggaactgtcccgcattgaggaggcgctgatggatcctgggcggcagccagagtccgcggatgattttgaccgactggtgctgagctcccccaacagctccattctgtggctgcagtacatggctttccacctgcaggccacggn

SEQ ID NO: 36640 - DNA, 497 bp, Homo sapiens
  misc_feature (1)...(497): n = A,T,C or G
cggctgggacgccgcaattgatncccgtcggttttgatcgccttcggnaccggcaccgattcgtgcggagaaactgtcactccaggtgtgggagtcaggagactaaatgttctgggaaggatggccagtgatcccattccttgtgcgggtaggataggaagttcatcagcaaaagaaaaaagagagaaagcctttaccactccagaaaccatttgtctccctacctatcataatccatccccgcaattataaaccatttcctctcaactagatccccacctaattgctaattccaaattctcgcttcagaccaatcgaagtttgtgcttccaggcgtctcagtaggctgcgacaaaaccttttgactccaaacacattcctgcctaggaagctcagggcacattcccctggacaggaaagagcaatgggcaaaggaacatctatgaatacagtcatttatggctctgaaatgagcacatacagttcttttacatgtt

SEQ ID NO: 36641 - DNA, 399 bp, Homo sapiens
ttcagccagtccctccgtttggggtccctgacttcctgcaacacgtttctctctactcacagacttctgaccaaatgtgtgtgcagagtttctacaccagttctccaactctctggataccaaccgcgtatcccacaattccattctgacactacctagagttagcacagaacccacaggttaggggctcagtcccacaagaccaccctcacttcagatgccagttgcaagtcctaggttgtcacctgtattttgaccaaccagttagaaatcagggtttcccatgaccctcttgttgagtttaattatttactagaacaactcacagaacttagaaaaacaagttttttttcttttctttttaagagacggggcctcgctctgttgtccaggctggtg

SEQ ID NO: 36642 - DNA, 425 bp, Homo sapiens
cccacgcgtccgattctctcccaggccacaagacatttcctgctcggaaccttgtttactaattgtctctgtggcacattttgtttcccgtgccttgggtgtcaagttgcagctgatatgaatgaatgctgtctgtgtggaacaagcgtcgcaatgaggactctctacaggacccgatatggcatccctggatctatttgtgatgactatatggcaactctttgctgtcctcattgtactctttgccaaatcaagagagatatcaacagaaggagagccatgcgtactttctaaaaactgatggtgaaaagctcttaccgaagcaacaaaattcagcagacacctcttcagcttgagttcttcaccatcttttgcaactgaaatatgatggatatgcttaagtacaactgatggcatgaaaaaaa

SEQ ID NO: 36643 - DNA, 397 bp, Homo sapiens
gttgggtccggcctccgaggcctgtatcccgccttttccgcataggcatgtgaccatggtctgccgcggagttttgctgaggtcaggagtttgcgcgaccagcctgagcaacatgcgaaaccccgtctctacaaaacaaattcaaagactggccggatgtggtggcacacgcctgtattcccggcactttgggaggctgaggtgggggaatcgcttgagctcacaaggcggaggttgcggcgagcggagatctgcactccagcttgggcaccaaagtaagactctgtctcaccaaagaaacaaaaggggaagtgaattttgttttttaaaaaaaaaaaaaaaactgggcaggagatctaaattccttttgaaaattggttgggaaaaaaaaaaccaa

SEQ ID NO: 36644 - DNA, 425 bp, Homo sapiens
  misc_feature (1)...(425): n = A,T,C or G
aaaatttttctattctaaatgaacataaggcaaattatggaaatcattatcagctgactcagcagcagaatctagaattcagcttctggtgaaatagtggcaggtttaaagcatggagttgtaagaatcagatgaaccaaattccaattctttctggctggggagcaagttatttaatgattgtgagcctcagttttctcctccattaatgggagtgttagtactttatagttgggaattgatgtgaaaattaaataatgtatttagtaagtgtttggcaccgctcctgcctgacacacatcagctgttcaggtagtgacttcaaaagctggagttgcatgcatttcattatatcagctctccaccttacacagagcactttcacattaataacactcagngctgacaacaatattgagtacaac

SEQ ID NO: 36645 - DNA, 426 bp, Homo sapiens
agcaatctcatcaaatctccaaactcttaaaggatgctttcggaaaacacgctgtatacctagatgatgactaaatgcaaaagccttgggctttggtttttttctagtaaggactttaaataactgccgacttcaaaagtgttcttaaaacgaaagataatggtaagaaaaatttgaaagctttggaaaaccaaattcgtgatatcattgtattttttattaaaaggtttgtaataaatttctaaattatcttctggtaaaaaaaaaaaaaaaaaaacgggcgcccgattaaaaaaacccttcgtggggccaaagcttacgcgggaatgcaagggattattcttctccttatatggagcacaattttaaccaagcttggaactttgaggaagaaaccattcttttgtgggggaaaataattgaaaa

SEQ ID NO: 36646 - DNA, 419 bp, Homo sapiens
ctgatatatatacaatagatataaacttttaagagatagaatttagtattatcaaagggatatttaaaaaaatactatttaagatgtgaaaattacagtccaaaatactgttctttccaggctatgtgtaaaatacatagtgaaaattgtttagtgatattacatttatttatccagaaaactgtgatttcaggagaacctaacatgctggtgaatattttcaactttttccctcactaattggtacttttaaaaacataacataattttttgaagtctttaataaataacccataattgaagtgtataatataaaaaattttaaaaatctaagcagcttattgtttctctgaaagtgtgtgtagttttactttcctaaggaattaccaagaatatcctttaaaatttaaaaggatggg

SEQ ID NO: 36647 - DNA, 381 bp, Homo sapiens
  misc_feature (1)...(381): n = A,T,C or G
ccaaaatgacatcattttccacctctgctcagtgttcaacatctgacagtgcttgcaggatctctcctggacaaatcaatcaggtacgaccaaaactgccgcttttgaagattttgcatgcagcaggtgcgcaaggtgaaatgttcactgttaaagaggtcatgcactatttaggtcagtacataatggtgaagcaactttatgatcagcaggagcagcatatggtatattgtggaggagatcttttgggagaactactgggacgtcagagcttctccgtgaaagacccaagccctctctatgatatgctaagaaagaatcttgtcactttagccactgctactacaggatcacagtatggatattccaagtcaagaccan

SEQ ID NO: 36648 - DNA, 436 bp, Homo sapiens
ataaaccacatgtgctagtggatctacttgtggatgatagcggtaaagagtccttgattggttatagaccaacagaagattccaaagaattttcatgagatcagctaagttgcaccaactttgaagtctgattttcctggacagttttctgctttaatttcatgaaaagattatgatctcagaaattgtatcttagttggtatcaaccaaatggagtgacttagtgtacatgaaagcgtaaagaggatgtgtggcattttcacttttggcttgtaaagtacagacttttttttttttttaaacaaaaaaagctttgtaccttatgaccctttacatccaaatgggttaccagtaccggaacagtatccagtcctcctggttcctaggggagcaggtgatgccccagggacctttgtacccatttcattttttttcg

SEQ ID NO: 36649 - DNA, 430 bp, Homo sapiens
  misc_feature (1)...(430): n = A,T,C or G
cagatggactcatccctttcttatccgagaagccccatcacatgctatgtcctatcacatgctataccanaagctagggctgcagaggtggatgacgcccccagatccctgccccctaggggcttaagagtctagcaggggcacctgacccaagtaagtacaatgcagggtaaggctggctaaagagcacgtgaaaaggagctgggaacacagctggtcagcagagcttcagggagggctgaaggacaggctgcacacgaggcactcagaaaacagcagtgaaacagaaggcaggcagcaacggcagtggtactggacctggggaacaccaagttcaagctctatatacaacgaggacaaaaatgaaccaggctccctgaaagcagggaatctaacctgtgctacggcgccttcccagtccacgagggcg

SEQ ID NO: 36650 - DNA, 416 bp, Homo sapiens
  misc_feature (1)...(416): n = A,T,C or G
caggcctgcagtgatggtgaggaatgttctgagatttgcgaaggcatttgagtagtgaaatgtaagcacaaaacctcctgaacccagagtgtgtatacacaggaataaactttatgacatttatgtatttttaaaaaactttgtatcgttataaaaaggctagtcattctttcaggagaacatctaggatcatagatgaaaaatcaagccccgatttagaactgtcttctccaggatggtctctaaggaaatttacatttggttctttcctactcagaactactcagaaacaactatatatttcaggttatttgagcacagtgaaagcagagtactatggttgtccaacacaggcctctcagatacaaggggaacacaattacatattgggctagattttgcccagttcanaatag

SEQ ID NO: 36651 - DNA, 416 bp, Homo sapiens
  misc_feature (1)...(416): n = A,T,C or G
ctgagctcgaatttgaaccagatctgtctgaattcatacaccatgctcacagccaccatcctgtgccaagacccatcactgaacatttctggaggtacaccttgactgtccctggagacagcccctgtgctcgagttggccacagctgttcatatttacccccagttggtaatgccaagagagggaaggtcttcattgttgggggagcaaatccaaacagaagcttctcagacgtgcacaccatggatctgggaaaacaccagtgggacttatatacctgcaagggcctcttgccccggtatgaacatgctagcttcattccctcctgcacacctgaccgtatctgggtatttggaggtgccaaccaatcacgaaatcgaaattgtctacaagtcctgaatcctgaaaccaggacn

SEQ ID NO: 36652 - DNA, 424 bp, Homo sapiens
cagtcattcaaacctgactccattaggtgctgctcattgccttggaggctgctgctcctgtgtgtcagatccacagagatatccgagttcagaaatgagtggaaaaatacccatggtgggcaggaagagaaatccccttgctatattcccattgtgagcagtgccaccctgtgggatagaagcacacccagtgcaaagcacatcccttgttatgaaagaacttcagtaccctgctccagattcattaatcacatgaagaatttctctgaatctcctaaatttcgtagtctacactttctgaattttccaggaagtcaccatggacaggccacacagaaattacagggagctatggttcttcaccttgaagatagaaatgctctccattccctttgtgcctgtaaactcctcctgatcctctcaa

SEQ ID NO: 36653 - DNA, 403 bp, Homo sapiens
acgattttttgtgctgtaattgttctgggtagatggagtttaaacattcgaatggaaaaaaattaacctagaataatatattcattttagtcaagtctgtgattatttatgtgaaatgagaaccattgtatcagatgttgataaaagcaattttaacttgcagatgtgagcccctgggcacaatgagccgctaaatgggagctcaattgacaggcatctccatgtcttcaaggaggactgagttctcacgggagaactgggaatggggccagggtgcaaaaatgctttgcccatctgtaggtagacacacagattgctcagggcactgagagattccaaaaggtaacgttaatggtttcagtcattgtgtgtcctttgttgctgcccatgtctttggactgtg

SEQ ID NO: 36654 - DNA, 412 bp, Homo sapiens
cggacgcgtggggaatagctgagaggcgcttccgttcggtcagctgggctcggagtgcaacggggttaggatggacgaggacgtgttgcaccctgaagagcctcatcatcgcctgctcttgaggttcacagatgatacctttgatccagaacttgcagcaacaatagacaatgcaggaatcacatgaacctgtccatccacagataaagtggtaaagaaactgccgtattagatacatgatggtatactcttcagccataaagcttcgggaaaccctgtcatccgcaaccacgtggagaaacctgtccatccacagatgaagggatcaggaagctctggtatatatactgaagggaaatgctttttggctaccaaaataatgaaattttgttgtttggagcaacacagatga

SEQ ID NO: 36655 - DNA, 407 bp, Homo sapiens
aaggtggcgagggcggacggcacgccgtgtaccatgctgagcacctgctgcagacggccgggacctgcggggtcagcgacgacagcctgggcagcctcctgggaccccggacggcagccgtcttcaggcctcggcccggggactctctgccatcccgagagacccgctacgtggagctgtatgtggtcgtggacaatgcagagttccagatgctggggagcgaagcagccgtgcgtcatcgggtgctggaggtggtgaatcacgtggacaagctatatcagaaactcaacttccgtgtggtcctggtgggcctggagatttggaatagtcaggacaggttccacgtcagccccgaccccagtgtcacactggagaacctcctgacctggcaggcacggcaacggaca

SEQ ID NO: 36656 - DNA, 469 bp, Homo sapiens
  misc_feature (1)...(469): n = A,T,C or G
atgagttcttcttttaccctcttgacttcacctttgtgtgccccacggagatcattgctttcagtgatagggcagaagaatttaacaaactcaactgccaagcgattggtgcttctgtggattctcacttctgtcatctagcatgggtcaatacacctaagaaacacggaggactgggacccatgaacattcctttggtatcagacccgaagcgcaccattgctcaggattatggggtcttaaaggctgatgaaggcatctcgttcaggggcctttttatcattgatgataagggtattcttcggcagatcactgtaaatgacctccctgttggccgctctgtggatgagactntgagactagttcaggccttccagttcactgacatacatggggaagtggcccagctggctggaaacctgcagtgataccatcaagcctgatgttcaaaagagcaatgaatattttn

SEQ ID NO: 36657 - DNA, 396 bp, Homo sapiens
  misc_feature (1)...(396): n = A,T,C or G
gagggggtgtcctagggctcctgcccccaccccatccttgtttttcctctctgggctgacactgttacctttgctgctgctgctgctgctgctgctgctgccgccaccaggccagaaaaactcgctgggcaggactggctgctgccagcattaggcctgacttggtccttggggcttttctgacagcccaggggtcagcctagccccttgttcccctgggtaggtggatgtaggggtcacacagagagacaaagatactcatgattgctcagtgagagactcacacataacagtcactccacacagtgggagacacacacagacacacacacacacaagcatcccaggaatgcacactcagacacaatggagacgctctcacaccccctgcactgn

SEQ ID NO: 36658 - DNA, 429 bp, Homo sapiens
caacaaaaatctgggaatggtctgccgaaaaccgaccgacccggttgattggccaccacttgtcctgggactgctcactctgctgaagcagttccattcccggtacaccgagcagttcctggcgctgattggccagtttatctgctccacggtggagcagtgtacaagccagaagatacctgaaattcctgcagatgttgtgggtgcccttctgttcctggaggattatgttcggtacacaaagctacccaggagggttgctgaagcacatgtgcctaatttcatttttgatgagttcagaacagtgctgtaactgtttttcctacttcttcaatggaaggattgtccttagatcttcccaccatcacaaatgaatttgaagatgaaaagaaactcagttgctcatacaactgcattttttctgtctat

SEQ ID NO: 36659 - DNA, 414 bp, Homo sapiens
cgtcggtctcagcctgtcacccaggctggagtgcagtgtcacagtctcagctcactgggagctccacctcccaggttcaagctattgccctggctcagcctccctacgagctgggatcccaggcacgagccaccatgcctggctaatttttgtatttttagtacaaacggggcttcaccatgttggccagactggtctcaaactcctgacctcaagtgatacggccacctcagccttgcaaagtgctggcaatataggcttgagccactgtgcctggcattatttgttgcttaaccaatgatgctggctcaatcccagaagtagaaaacgtagccccttctgtgccacagaaaattgaatgtagctattgtggagttgtaatatgaggctctgcgtaaaatccagagctcatac

SEQ ID NO: 36660 - DNA, 416 bp, Homo sapiens
cagaacacaggagtcgtgaaaactacccctaaaagccaaaatgggaaaggaaaagactcatatctacatgaggcgtgattggacacctagacacgggccagtccaccactactggccatctgatctataaatgcggcggcatcgacaaaagaaccattgaaaaatttgagaaggaggctgctgacatgggaaagggctccttcaagtatgcctgggtcttggataaactgaaagctgagcgggaacgtggtatcaccattgatatctccttgtggaaatttgagaccagcaagtactatgggactatcattgatgccccaggacacagagactttatcaaaaacatgattacagggacatctcaagctgactgtgctgaactgattgttgcttgtggtgttggtgaatttgaagcg

SEQ ID NO: 36661 - DNA, 418 bp, Homo sapiens
atggaagtttacagttagagagagtgggatgttgaaggtaatactggttgcatatttcttatccaaaatgcttgggaccagaagtgtttcagatttcagatgttttcagattttggaatatttgcattatacaggttcagcacccctaatctgaaaacgtgaaatccaaaattctccaatgattgtttcctttgagcatcacaatggtgctcaaaaggttttggattttagagcatttcaaatttcagattttcagattagggataataaacctatatctcagaaacggtacatttctgaataatgacaaattgtcattatttgccatgagaattgtcattaatgtgggtggagatggggatgattgtaggtcaagagactgaagcaatagggtaggcttgggtgttagtacggccct

SEQ ID NO: 36662 - DNA, 461 bp, Homo sapiens
  misc_feature (1)...(461): n = A,T,C or G
aatcgtacccctgaggaccgcgccggaanccccgggacgacccacgcgtccgcggacgcgtgggcggacgcgtggggaagcagggaggatttcttgtgccattttcataatggtcattagctccttttaagctagaaacgtagcctgagctcctgaagagttcctgggagatttgagctgattttggagatggagcaggacaagtggggagtctctctctctctttctctctctgtctttttaaccaaaaagagatgacaaaactaagttcaggggccatggaaaatgaaaaagtccgctatattgtgatttgggaagagaaagttatcaatagaaagaggtgaggatggaaagatggagaaaaacagactgtgggaaggatcataaggaatccgccgaggcagggatgggtgtgcccatgtgtgccttgacgggacttcatcttatagactgttaaactg

SEQ ID NO: 36663 - DNA, 400 bp, Homo sapiens
tttacagcgacagcctccatcttccaagaagagcgatggttctgggacatatactaagttgcagaatacccaggtgagggtcatgtctgagaagaagcaaagaaaaaaggtggaatcagaaagcaagcaagaaaaggctaatcgtataatatcagaggccatagcaaaagcaaaggagcgtggggaacgcaatattccacgagtaatgagccctgaaaactttcctactgcttcagttgaaggaaaagaggaaaagaaaggtagaaggatgaaatccaagccaaaggacaaagacagcaaaaaaacaaaaacatgttctaagttaaaagagaagacaaaaattggcaaactcattattacattgggtaagaaacaaaaaagaaagaatgagtcttcagaa

SEQ ID NO: 36664 - DNA, 419 bp, Homo sapiens
aaaaggactcttgggggctcagagtgagagccagggttacctactctgccaagtgaggacaaactgctaggctgtatcccataatttcaggatgagaaacattaacaataaaaatttgtagtaaacataacctcatgaagaactaatcatatggtctctgtcgtcctcatttccttgggatttgagggaattttgtttggagctcaccctggttcacaggctggccatgagcactggtgctgtaaaccctgtccctttcctcattcaccccgtggctggccatgagcacaggtgctgtaaaccctgccccttccctcattcaccccatcagggttgactttgggcagagcagccacagactcacctgaaaggggcctgcctctccacacctgtgggtatttctcgtcaggtgggacgag

SEQ ID NO: 36665 - DNA, 476 bp, Homo sapiens
  misc_feature (1)...(476): n = A,T,C or G
tgggttgnnatttgaagcctcggaccttgacgacttgcggtacacccacgcgttcggacactgatggatcggcatacagtctgggcgtagtcaacattttgtgggagaaaaggaaggaattacactaggagatctgggatgcaagtatatattcggcccttgattagccttttgctttggggttaaaagggagtggctgggggtgggtgaggttttaactagatttccaagaacctctttcctccttgcttttgaagttgggggtgggggtactatattggtttgtcagtcagctactcatgccaaacattaggtcattatcactttcactaaattcactcattcaacactttttggtctgcaaaattttgaaacgggaaagagttaatgaatacccaggcaattttaacacaatgatgaaaaaggctacaaaggagtaaatctccgtgttatgaaagtgtgcaaaggagaggtcg

SEQ ID NO: 36666 - DNA, 428 bp, Homo sapiens
tcacctgatatacaggaaataaaacatgagaacaaataatcagacatatactttaatgttaaaggtgctctatttttttggatgtacagtagttttatttccacagccacattaccatagcaataagaaaggaggcatagtacatagttggaaaagctttgtggggggattaaaaaaaaaaaaaagcactgtggggttaaacactagttcaaaggcagttaccttaaaaacttatttatttgcaggaacaaagggggcctgaatattaacagggttctgataaaaaaaaaaaaaaaggggggccctttttaaaggacccttggggggcccaaattttcccggggtttgcaaaaaaatatttttttccttatggggagccttattaaaacccacctgggaattttgggaaagaaactttatttgggggg

SEQ ID NO: 36667 - DNA, 416 bp, Homo sapiens
ctcatgtccaggacaggctcctcctcccttcccggtcgcccgagtgtgattccagatcactccaagaagaacatcggcggtgggattatttcctccccactgactggaaagcgacaagactctgggacgatgaagaagccgcacaccactgaagagattggtgtgcccatatccaggaatggctccaccctgggcctgaagtcccagaacggctgcattcctccaaagctgccctcggggtccccttcccccaaactctcccagacacccacacacatgccaaccatcctagacgaccctggaaagaaggtgaagaagccagctcctccacagcacttttcccccagaactgctcaggggctgcctgggaccagcaactcgaatagcagcagatctgggagccaaaggcagggctc

SEQ ID NO: 36668 - DNA, 402 bp, Homo sapiens
  misc_feature (1)...(402): n = A,T,C or G
cttgaatgtgtaagtccccacagagcatggacagtcggtgcagagttccaaggaaacaattattgcctgatgaccacttccattttgtatacactctttggttcgtataggccatattccaactggctttttagtaatagaaatccagtatataatgtatcaaacacactaagttagaacctcaattgtatttgatacattatatacaattgaggttctaacctagtgtgttaatttatctgaatttggatttttaaaaagtaataaaaaggtaaatgtcnnnnaaaaaaaacaaaatataatggataaaaaaacactaagtaaaaacctgggtggcctttgtacattatattcaaaggagggtctaaccctagggggtgactcatctgaatatcgattttg

SEQ ID NO: 36669 - DNA, 412 bp, Homo sapiens
ctcagatcaagatacggaagagcccagcactccacgatgctccatcatgcccctttgcagaaaatactgcctcctccagtaaacactattctgatgtcactatagattagttttgcctcttcgtgaactttgtataaatagaactgaacaatatgaactgtcctgtgtgatttcttgtatttcattatgggtggtgtgctattgtatcaacagggtatttgggtggttttcagatttgtgatattaacaataaaggaattataaatattgtagtacaaaaaaaaaaaaaagggggggccgttttaaaggatccttggggggcccaaattttacgcgggggggcgacgaaaaacttttttccttatggggggccgatttaaaaccagcctgggaatcttggggaggaaccttg

SEQ ID NO: 36670 - DNA, 479 bp, Homo sapiens
  misc_feature (1)...(479): n = A,T,C or G
nactgatacccctgcggaaccgcatgggaatcctgggtcgacccacgcgtccgcggacgcgtgggctcaaacatgcgtacacacacacacatttacacacgcaggactctggagccagagtagaggctgtggcccaggcactacctgctggctcccacctatggtttgggggccatacctgttccagctctgttcccagggtggggcagggaggtgggggttgggggagtatctcccctttctcccacgatactcccgagatactgcagaggttgtggcccaaggtccacatgcgtgctttcctctttgtgttggggacctagctgtttcacacttttttcccttttggggcagtgaggtggtgctatgcttatttttgaacctctctgcttctatatcctctacttttttaaatcaattgtcagcatgggttgttataggggtacgtcccgcacttagaccatacagctgctggggcg

SEQ ID NO: 36671 - DNA, 420 bp, Homo sapiens
ccgccgccagctcaccatggatgatgatatcgccgttctcgtcgtcgacaacggctccggcatgtgcaaggccggcttcgcgggcgacgatgccccccgggccgtcttcccctccatcgtggggcgccccaggcaccagggcgtgatggtgggcatgggtcagaaggattcctatgtgggcgacgaggcccagagcaagagaggcatcctcaccctgaagtaccccatcgagcacggcatcgtcaccaactgggacgacatggagaaaatctggcaccacaccttctacaatgagctgcgtgtggctcccgaggagcaccccgtgctgctgaccgaggcccccctgaaccccaaggccaaccgcgagaagatgacccagatcatgtttgagaccttcaacaccccagccatgtacgttgg

SEQ ID NO: 36672 - DNA, 407 bp, Homo sapiens
gcgcctatgtaatcccaactactcgagaggctgttgtaagaaaatcacttgaaccccggaggcttaggttgcaatgagcaaagatcacaccattccgctgctgcctgggcaacaagagtgaaactctgtctcaaaaaaaaaaaaaaaaagtccttttaaaatggccaccctgggagaccttatggggaatgaaaaccctttcttgaggaaagcggggatcgggggtttcccccacccttcttttttagctagctcccctgggattggagcccaatttggggggggcggaatacagaacctattgcttttgcagccccagattaatacttatggaagggaagggcttttggatgaacatgggggagacttaaacaccttccactttattatatttgaagaggtgactt

SEQ ID NO: 36673 - DNA, 408 bp, Homo sapiens
  misc_feature (1)...(408): n = A,T,C or G
aaaaaaagggcacaaagcctgtcagagttttcaacggtgcttatagctgccagctggattccaaacaggtaccccattgtctctgagctaatgtttatatttttccattcaggcaccgaaatagttaatatttaaaataagtcttcaaaagaaaacataagagattattgagttcttgggactggatcctttatttcataagttcagatcatcttaaatgaaaatgccatgattatctgcagttaagtagatgacagctattctacatcagacttgatttttgtcagctaattacataattggtaagctataattgaaaccttatggcttaaaattccttaactcctttttgattcatgtttgtagtcatgttgtcaacagaggcaaagttaagcttgatgatggttn

SEQ ID NO: 36674 - DNA, 396 bp, Homo sapiens
aaataatacatgaacacacatgtattctcattcaaactttgtggaactatatgaaataaaatgtagacattctctttccccttgctttcccatctggtcctttgtaagtgttagcgtaaagatagttatgttgacatatttaaatatatgttgctgctgctgtatttttaaaaaacataaatgatactttattataaatattactctagtgtttgttttttgtacataatatgtgctggaaatttttttatgtcagtatgtcattcatattattattgttattataaaaatactacatgcacaaggaaataaaaattgaaagatttaaaatggaaagttgaggaagatctaaaatggaaagtgaaaaactccacctatccccaagttccatccctt

SEQ ID NO: 36675 - DNA, 431 bp, Homo sapiens
ctggaaggagcttgcccaccgagcctttttccatggtggagacagtgattctacagctgccattgctggctgctggtggggagttatgtatggttttaaaggagtgagtccctccaactatgagaaactagaatacagaaaccggctggaagagacagctagggctttatattctctcgggtcaaaagaagacactgtaatttccctttagggagacgtgatgttcacttctgatggattcttcttttgggtatttccttttctgctatttcttttcagtttttccaaagtcaagagtcttaaccttgtactcagggaattttgagataacaagtcccttgggcaccttaagctcagttttttcaggctcatcctgttcttccagaatctatcccttttcttacactgaagagtcctttagctcaattgat

SEQ ID NO: 36676 - DNA, 483 bp, Homo sapiens
  misc_feature (1)...(483): n = A,T,C or G
cattgatcaccntgcgatagagcgccgtaaggcccggcncgacccacgcgtgcgcggacgcgtggggtcccagccgggttcgtgtcgccatggggcagatcgtattgggccatgtgggccaacgagcaggcgctggcgtccggcctgatcctcatcaccgggggcatcgtggccacagctgggcgcttcacccagtggtactttggtgcctactccattgtggcgggcgtgtttgtgtgcctgctggagtacccccgggggaagaggaagaagggctccaccatggagcgctggggacagaagtacatgaccgccgtggtgaagctgttcgggccctttaccaggaattactatgttcgggccgtcctgcatctcctgctctcggngcccgccggcttcctgctggccaccatccttgggaccgcctgcctggccattgcgagcggcatctacctactggcggctgtgcgtggcgagcancgg

SEQ ID NO: 36677 - DNA, 400 bp, Homo sapiens
  misc_feature (1)...(400): n = A,T,C or G
cgccttcacaatcttaatattttttttaaactgcatgcctgccccttatttgagctgcctttttaatttattgcatatcctttttattatcttattttggtattattcaatctatacaatctttttgtatttattgggaaatgagtaatatacaaaaaggttttcatgtatttgtggctgagagggcgggaaataattgtgtacataaaattaggcttttttaaaaaaatagattatgatgcagaatattgttgatcttagattaaaaagtggaagagccacaaacattggtgcccttttcagactatttctctactctcatcatccacagtagaatttttaaacagatttttttaaagcttttcttttaaatttttctccgttgcaaagaatgtttccn

SEQ ID NO: 36678 - DNA, 478 bp, Homo sapiens
  misc_feature (1)...(478): n = A,T,C or G
agggcngnnnnnnnnnaaatgaaagccgtccgacagcntcgaantcncggncgacccacgcgtncgggcgtcgaccacagtattccaaccctcctgtgcagggagaagtgatggagggtgctgacaaccagggtgcaggagaacaaggtagaccagtgaggcagaatatgtatcggggatatagaccacgattccgcaggggccctcctcgccaaagacagcctagagaggacggcaatgaagaagataaagaaaatcaaggagatgagacccaaggtcagcagccacctcaacgtcggtaccgccgcaacttcaattaccgacgcagacgcccagaaaaccctaaaccacaagatggcaaagagacaaaagcagccgatccaccagctgagaattcgtccgctcccgaggctgagcagggcggggctgagtaaatgccggcttaccatctctaccatcatccggtttagtcatccan

SEQ ID NO: 36679 - DNA, 420 bp, Homo sapiens
  misc_feature (1)...(420): n = A,T,C or G
aaattcaaagagtaatcagtgcttacatctcaacaatgattcctctaccaccattattatagactccagtgatgaaaccacggaatccccaactgttggtactgcacagcctaagcaatcctggaatccttttcctgactttactccccaaaagttttaaagagaaaactgcagagcagcttcgtgtccttcaggcaagttttctcaacagctctgtacttacagatgaagaattaaataggttaagggcacaaaccaaacttaccagaagagaaatcgatgcttggtttacagagaagaagaaatcaaaagctttaaaggaagagaaaatggaaatagatgaaagtaatgcaggtagttccaaaagagaagctggagaaacttctcctgcagatgagtctggtgcaccttngtcaaggg

SEQ ID NO: 36680 - DNA, 426 bp, Homo sapiens
  misc_feature (1)...(426): n = A,T,C or G
agcaatttcatcaaatctccaaactcttaaaggatgctttcggaaaacacgctgtatacctagatgatgactaaatgcaaaatccttgggctttggtttttttctagtaaggattttaaataactgccgacttcaaaagtgttcttaaaacgaaagataatgttaagaaaaatttgaaagctttggaaaaccaaatttgtaatatcattgtattttttattaaaagttttgtaataaatttctaaattatcttctggtaaaaaaaaaaaaaaaaaaaagggcggccgctttaaaggatccttcagggggcccaagtttacccgggcgtgcagagaaatagttttttccctataaggagcgccattataacctagctgggaatttttgggaaggaacctatcttctggggggaaacaaaattgacan

SEQ ID NO: 36681 - DNA, 381 bp, Homo sapiens
ctcagctgaccccatctttgagcccaggctactacctgcctttcaagaagggattatgagctggtcccccaaagagaagacatacgagacagacctagcagtgcttcaatgggtagaggagctggagcagcgggttatcatgtctgatctgcagattcggggctggacatgtcctagcccagactctacccgtgaagacttggcctactgtgagcacctctccgactcccaggaggatatcacctggcgaggtcggggcagggagggactggcacctcagcgtaaaactaccaaccctttggacctggctgtgatgcggctggctgccctggaacagaatgtagaacggcggtacctgcgggagcccctctggccaactca

SEQ ID NO: 36682 - DNA, 368 bp, Homo sapiens
ggatcgccagtggggattggtgcgtgtgcggaaacggggacagaagtgaaggttcatcgcctataacgaagatgagataggacaaaattccttttcactgcagtattgggagcctggaactagagttaccaacccctctgcgttaaagaaggagctgtcctgaggcttccatctctactgggcttgaggcaagaacattgttagggacggcctgctcttggcctctgtgccccagggattgcaaatgcatgttcctcaaaggtaagggctgtatcattcggctttctttgtattcacaggtacagcttgtgctaggcagccggtgttcaataaatatcgtgcctaaggaaaaaaaaaaaaaaaggggg

SEQ ID NO: 36683 - DNA, 477 bp, Homo sapiens
  misc_feature (1)...(477): n = A,T,C or G
catcgacgcctgcgatgagcccggtagaaccggcncgacccacgcgtncggagaggtggccgcaaggcgcctgacgcgctgggcattacctccgcagattctgaacatctaccacaacctgaaccggcgggagcacgagcacgtgatccacctgatggacatcgccatcatcgccacggacctggccctgtacttcaagaagagagcgatgtttcagaagatcgtggatgagtccaagaactaccaggacaagaagagctgggtggagtacctgtccctggagacgacccggaaggagatcgtcatggccatgatgatgacagcctgcgacctgtctgccatcaccaagccctgggaagtccagagcaaggtcgcacttctcgtggctgctgagttctgggagcaaggtgacttggaaaggacagtcttggatcancagcccattcctatgaatgaccgggaacaaggcgggcgacg

SEQ ID NO: 36684 - DNA, 414 bp, Homo sapiens
cccacgcgtccgcggacgcgtgggtgtgaacattacaaatgatgtatttaaagcacctacctcagtgactggcatgtagcaggtacaaaataaatgttagctttaaaaggtattttaatcaattttattattcccagggcttcagcagacagtaagtttttccctttacactccttttattttttttaatctgacttaatattaaatgctatatttataggaggcattttatgtttaatttaaaagtaaaagatgcagaaatgattcttgtaagtttgctgtagtttggtaataccatttctttgcttttaaataactaaaccccaatatcaatctgcttgtcctccatttcacccccaacagggtgtatacatgggctggttaacagcatctggaagtggagcccggattctt

SEQ ID NO: 36685 - DNA, 463 bp, Homo sapiens
  misc_feature (1)...(463): n = A,T,C or G
accgctactacacactgagtacaaaggggaagactgagactctcatcaagcangagagagtggtttgcagggcaagggtcctagaagagcctgtctatatccatttctgagtatgcaaagatacatctaaataagtggggccatactgtcctcctcatgggacaaaaagaacagaaaatgtaagatatttcaaagatatagtaatatttctcagaaagaaagaaaaacactggtctcatattgaaaatgatgcagcatattgggcagaacgagtaaagaacgacccacaactagaaatatcattgggaagtttccagacttcatgatggataaaggaaagatcttcaatgacttggaggaagaaacagagacaaagtcagggcggngtggcatggggggctgagatcagagagtgaggacttcagctagccaaagggtcctgacggccagtctgttagggtgt

SEQ ID NO: 36686 - DNA, 461 bp, Homo sapiens
cacagatgagacattgagattttggttttttcaaacagggttatgttaccttagtagtagcaatgtaaagactcaacctgaacattaaacttttcatggaagtacaaaagaaatgagtatcctagaaattgattataatattgatgtctcaaattttatgtaagttacacataaatataaaatcccaaaaacatgcacctaccaaaacaggtggagaaaagagtgttttcaacaaatgatgctggaacaactgcacatccatatgcaataaaaggaagctggacacagactttaccctcttttaaaaaaaactgacccaaaaatggaacacagacctaaatgtaaaatgcaaaactatgaaactcctagaagataacacaggagagaatctaagggaccttgagtttggcaatgactttttagatacaacaccaaagacacaatccatgaaagatataaga

SEQ ID NO: 36687 - DNA, 459 bp, Homo sapiens
ccatggtgctgtctcctgccgacaagaccaacgtcaaggccgcctggggtaaggtcggcgcgcacgctggcgagtatggtgcggaggccctggagaggatgttcctgtccttccccaccaccaagacctacttcccgcacttcgacctgagccacggctctgcccaggttaagggccacggcaagaaggtggccgacgcgctgaccaacgccgtggcgcacgtggacgacatgcccaacgcgctgtccgccctgagcgacctgcacgcgcacaagcttcgggtggacccggtcaacttcaagctcctaagccactgcctgctggtgaccctggccgcccacctccccgccgagttcacccctgcggtgcacgcctccctggacaagttcctggcttctgtgagcaccgtgctgacctccaaataccgttaagctggagcctcggtagccgttcctcctg

SEQ ID NO: 36688 - DNA, 420 bp, Homo sapiens
cagaatactaaaacacacaaaacaacaatagaatcttttaaagatattactcctatttgtatgtataggaaatgaggtcagcatcactaagtcacaactgttcagtcaatgtttatttcctagcaaatgttttcctagcaaaacatatttcctggcaaagaccaacagaaataaattaacaaataacaacctggtcacaatacagatgataaaatatccattaaaataaaacaagccttaaaaaaaaaaaaaaaaggggcggccgttttaaagaatcctttggggggccaaagtttacccgggcatgcaacgacataattttttccttataggggggcgtattataacctcgctgggaatctttggaaaggaactttattttgggggggagaaaaattggccaacctccctccagaaatt

SEQ ID NO: 36689 - DNA, 461 bp, Homo sapiens
  misc_feature (1)...(461): n = A,T,C or G
cccacgcgtccgatgaaagtcattgatactttcttctttctcacctcccacatccatctggttttaagttgagacaattttttgatatcaatgttactagtatttgtatttactttctcacccccgtgcttactactctaattcaaatcctatttttccctctcctcaatcattgcatttgttttctgattggactccctagcattggtctctttcaatatgtgcatactcaacagagctgccaaagtcatcttccactgacacattttaagtcataccacattcctgctcagaaccctgatcctggaatatctcaacatgcagataacaaggaagctatcaaagttatgtcaaaaggattttgagagactctgaacaaccaaaagggggacaatttgagattcaatanagataaggatgtcaatgaattgaatccatcaagtgtgttaaaatctagagtn

SEQ ID NO: 36690 - DNA, 404 bp, Homo sapiens
tggattacatgggctccttcttggtttttgctgctgggcaggacttgacttagcattatccaagcaccagtccaagtggggttccctgttgccagttagagaggtgagaatgtttggactctaactcaccgattgctttgcagacaaaggtcttttatttctcctgtcctatcttaagagtccaaatgtctctggtgatgttcctaagacccttgtcccagatactctaaatgtgaatgtatgagctgggggagtcaacccagcccaccatgcgttggctgatgataccagaggcagagagtgctggtctgtctgggaagcttagcaatgtatcttcaaatttatttttgtttttaaaaatatttcttaaacatgctgtcccaacatttgtgagttgtgtcaca

SEQ ID NO: 36691 - DNA, 415 bp, Homo sapiens
gaagagccacctgcaagatggacacgagcctcattctgcactgtgaacctgggcactccgcgccgatgccaccggcctgtgggtctctgaagggacccccccccaatcggactgccaaattctccggtttgccccgggatattatagaaaattatttgtatgaataatgaaaataaaacacacctcgtggcaaaaaaaaaaaaaaaaaaaaaaaaaaaaaaaaaaaaaaaaaaaaaaaaaaaaaaaaaaaaaaaataaaaaatataaaaaaaatagaaaacacaagaaaattaactaaaattcaatttttccgtagaattataaaaaaattcacttttttgggcgcgggaacgtatattttctactgtgtcagctttccctgtgctttcccctattatacttctttattatttag

SEQ ID NO: 36692 - DNA, 406 bp, Homo sapiens
cggacgcgtggggttacaggagattgaatttatagataaaagcacagtcatcatagtttccacagtacattgcagcacatttagcttgctagcctaaaaatctgatcatgctgagtttcttttaaagaaagttaattttagaacttcaaactagaaccagtttgaacctcaagttgaccgttgtctgagttttaaaaatctcttcccattttcaaagatttttcaaatggatgtaggagaggaccaaggaggtaggctatagctgtagaacaacacagtcctattttcagaaacgaacagacacacgttttaagtcaggcacagcccatgtatccaggtgcatcaaactggggatgctaagttcaaaagtgcgtctgttttgaagatttcatctgaaaataatgtg

SEQ ID NO: 36693 - DNA, 414 bp, Homo sapiens
actatgctgctagttacagtgtaggcaccccggcccagcagcccagcagcccacatgtgttcaggaccctccctgcccaccccctccctgccgtatcgatcaccagcaccagggtggcccgtgtgcgtggggccagcgtcgccgggctgcccagcctggctctgtctacactggccgagtctctgggtctgtctacactggccgagtctccgactgtctgtgctttcacttacactcctcttgccaccccccatccctgcttacttagacctcagccggcgccggacccggtaggggcagtctgggcagcaggaaggaagggcgcagcgtcccctccttcagaggaggctctgggtggggcctgctccccatccccccaagcccacccagcactctcattgctgctgttgagtt

SEQ ID NO: 36694 - DNA, 403 bp, Homo sapiens
agcaaacgagggccaagaccatctgagccagccccacatctagaactcccagaccctggacttagccaccagagagctacattttaaaggctgtcttggcaaaaatactccatttgggaactcactgccttataaaggctttcatgatgttttcagaagttggccactgagagtgtaattttcagccttttatatcactaaaataagatcatgttttaattgtgagaaacagggccgagcacagtggctcacgcctgtaataccagcaccttagaggtcgaggcaggcggatcacttgaggtcaggagttcaagaccagcctggccaatatggtgaaacccagtctctactaaaaatacaaaaattagctaggcatgatggcgcatgcctataatcccagcta

SEQ ID NO: 36695 - DNA, 410 bp, Homo sapiens
  misc_feature (1)...(410): n = A,T,C or G
ataagtatttatttaatttgcatattattaagaatagcagtacaactgaatgctataaggctagaaggacttcattattaaagaatgtccatgcagattataaaaggacaattcaatatttaagtccacatttataatgccagtaatagaaaatacaatgtgaggtgaagcatttgcgaggcagctgaaatagaaattattctggctttttattgcggcagcatttttgttttagaaactactcagtcatctcaatgttcatagaatagaatagcttttttggggaaggttatgtttgaaattttagattagctttaaaaacctttaggtgaattcttttaacatcttgtatttgtttacagagaatatctgtttcgattactgaatgcctatggtatgatgaaaccatn

SEQ ID NO: 36696 - DNA, 513 bp, Homo sapiens
  misc_feature (1)...(513): n = A,T,C or G
ccatacgaccgtcgcaccgnncngacantnccggncgacccacgcgtccggcctgggcgacaaggcgagactctatctcaaaacaaacaaacaaacaaacaaacaaaaacccaagaaggaacaaatcctgaatttggaaagaattcagtaagtcttctctaatgagcctcctcaaaacacttctccttcaggcaaggagcctttttttcccctttagaacaaccatttacagcatctgaggccttttttaagggccaggtctcttccctgctgttaggtttttaattttaaggtcaagtttctaacaaaatttgttttgttgttgagagattaaactggccatatgagcattaaaaccatctgcttctgaaatagcaagctgaaactcaaccaaaacttgaagctgtttattacgctcacataccaagtcctctctcttcatgggtggggaccgggaattcatttgcagaaagaaggtgcatttccagtcacccagaaccgggcgctgcagtn

SEQ ID NO: 36697 - DNA, 419 bp, Homo sapiens
  misc_feature (1)...(419): n = A,T,C or G
aaggaactcctcaagaaccacgctgtggtttcagcaagcagatggtggaaattcttcacaaacataatattcagtttagcagttttgatatcttctcagatgaagaggttcgacagggactcaaagcctattccagttggcctacctatcctcagctctatgtttctggagagctcataggaggacttgatataattaaggagctagaagcatctgaagaactagatacaatttgtcccaaagctcccaaattagaggaaaggctcaaagtgctgacaaataaagcttctgtgatgctctttatgaaaggaaacaaacaggaagcaaaatgtggattcagcaaacaaattctggaaatactaaatagtactggtgttgaatatgaaacattcgatatattggaggatggaaaagntcgg

SEQ ID NO: 36698 - DNA, 409 bp, Homo sapiens
cttgtgcgtctcacagcatagcagctggctccctgcatagagggagggaggaggaggaagccacagtgccttgcacggccgggtctcagaggtctctatgtcccctccacctggttctttttgtcagacgagtcactaagtccaggccacacgcaagggatgggaatgagactctgccttttgaggagtgctcaggaatgcatggccgcatttaaactgccacactgtggccggtcagctgggtctgttccacttcaggatccacaggcctctcctggccctgcaggacaggctcccctgcctccactccagcccgtcctggtggttgtgagccgcacttaaccctgccaggatgcggcttgtactgggaggcccatgggctccgagaggacttcccttcaacctccag

SEQ ID NO: 36699 - DNA, 434 bp, Homo sapiens
  misc_feature (1)...(434): n = A,T,C or G
ccctctgggagcacttgtgccttttctgaatctcccgtggcctggttcctctcatcaccatctgccttgtttggaggtcacacatgtgcttgtctgaaatgcttggagggcaaggacaggcaaggtcatccttgtttcaccacttgctcctgtacagagatctgggggcatttgatcagcatcaaataagtatcatttctttgtctaccatcttcccgctctggtgctatctccagccttttctctctttacgtttctttttcttttttctttgtctttttttttttgttggaaatggagtcttgctctgtcccccaggctggatgcangngcntgnntttgttttgtggancctccgccttccgggttgggacggtcctcctgcctcggcctcccaaaaggtgaaattacaggtgcccccccatctttttaan

SEQ ID NO: 36700 - DNA, 403 bp, Homo sapiens
cacttatcaaaattgtgtgcaaatttccttggctaacagtaacagtttttgtctgggcttgtctagcagtggaattctgcctgagttcatcatttttgtgactggtacttgaagtgcatcagatgattaatttcatgataagagggctttttggggtggtgaaatagacatttatggaaaatgggatacccacattaagcagggtgactacctgtttaccatacaacccacacaaagccaatacaactatagatgtgctttctttagtctgttgcctctgcaaacattgcccgtgtgtttctctatgcccttcaaaaacatcagagcagcacatcctggaagatcctatcttttgtaagtttaagaagcagcctcttgtcacagcttgactcctatgtagtgg

SEQ ID NO: 36701 - DNA, 393 bp, Homo sapiens
aaaaagggttcagggtcctcagaccgcagcgttacttccacagaaccttccctaaatcactgccctcccgcagcctcctcaaagagaggtggggttggctaggagtcagaacgctagcccgtgccagtttccccatatgtaaatattcggggtggactgagccactctgaagctttctttttttttttccttctgaaatagagtcttgctctgtctcccaggctgaaatcgcagcattgcactccagcctggacaacggagtaaaactccttcttaaaaaaaaaaccaaaaaaaccaagagacccccgccaaccttttcccccaaatttaaaggataaaaattttggtttttttttttttaaacatagggaaggttgatcatgtgctggagcg

SEQ ID NO: 36702 - DNA, 397 bp, Homo sapiens
aaggaatagccagagaggagcacctgaaccccatgggcttggacttcctggggccccgctgggatttcttcgctgctctagctggcaggacacatcccggcctcttcttccacccattcccccatgtggctgaagacattccaacaatggggtgggcccataatagttagccctcagtcagttcccggagcacagccctgggagggggctatttctctccccactgaaaacatttcaaagctgagttacttgtctgaggcctcatccctcggaagccgtctgactccagagtctgagcccccggctagtaccctatagagagggggctctccaaaggggctgctggggcatgtgtgcctgtggcagaaaagaggagacacctgaattcagcaccctg

SEQ ID NO: 36703 - DNA, 403 bp, Homo sapiens
cgccgagatgctggtcatggcgccccgaaccgtcctcctgctgctctcggcggccctggccctgaccgagacctgggccggctcccactccatgaggtatttcgacaccgccatgtcccggcccggccgcggggagccccgcttcatctcagtgggctacgtggacgacacgcagttcgtgaggttcgacagcgacgccgcgagtccgagagaggagccgcgggcgccgtggatagagcaggaggggccggagtattgggaccggaacacacagatcttcaagaccaacacacagactgaccgagagagcctgcggaacctgcgcggctactacaaccagagcgaggccgggtctcacaccctccagagcatgtacggctgcgacgtggggccggacgggcgc

SEQ ID NO: 36704 - DNA, 420 bp, Homo sapiens
aagttatgtgtaattaatctataatgccataaatgataatgcaaaacctaaataatatggtcgccggaggggctgccttatatttgaaacatgctttctatcatgcattgactgtatgcattttgttaatgcacattctgtttgtttaaggtgtgtaagatacacacccttctagatgaaactatatgtgccacactttgcactactcatgataacctcaagactatcagaagaaatatttaaatttccattttatgaagaaaggaaccaaattattatgctttttaaaacaaattaccagtttacataattaatcagggtgcattttaagttctaacttcgtttattgtataatgcatcatttgaaaataccaaggaggaaataccctttgtttttaatgatgcaagagtggacgtaat

SEQ ID NO: 36705 - DNA, 415 bp, Homo sapiens
ctgagtagctgggattacaggcacgcgccaccatgcccagctaatttttgtattttagtagagatggagtttcactttgttggccaggatggtctccatctcctgacctcgtgatccacccgcctcagccttccaaagtgctgggattacaggcgtgagccactgcacccggcccacatctgggtaactttttgtgttttttgtctagatagagtttcgccatgttgcccaggctgatctcgaactctagggccaaaccgatcctctcgcctcggccttgcaaagtgctgggattacaggtgtgaggcacagtgtccagcccacattgacctttatgtttgaggtgggaccaggttcaagcaggtttagggtagatggggcagggtggggatgactcacctgggagaggtcagcc

SEQ ID NO: 36706 - DNA, 418 bp, Homo sapiens
gaagggagactgcctcactgttgaccaattccaaaacctaaggataagcccatggggtatgtcaagctagcaggttcttctcggcccaggatgacagtgtctgggggcatcacaaaacagttgtacaatccaatgcagccgtcctgctcatacagtaagatccattaggccagagcaggcctaacttgggtggagagcccagcctgagcaccagaattagttgcttccacttgtgcagcctgctgaagagccggactcaggttgaagcagctttcctcccagtcttcactgatctccacagggagaaaacagaagtccccacaagtaccaagctcttcctgagactgcagccaccacacctcggggaaggggaggctggcaggagaggagtacactgtcccggtgacccacaccaagg

SEQ ID NO: 36707 - DNA, 423 bp, Homo sapiens
  misc_feature (1)...(423): n = A,T,C or G
gaagttgcctatgttttgtaataatttattttttagcaggaatattgattagcagctttttttttctttatacacatagataactaactagattaatgtttagtttcttatttgtaggcacaggatgcatgaaatttcaagctctgggattttttgtatattgtgtatctgtatcaaaaatatcctctccttttcaaaaatgacaggttggaaaatgtttgtcagacttattaactggtcatattataataatactgataatgaccaactgctcattctgaaagccaaacataaaagctaggagaagtggcatctgaacatttttgctttgctgccagagtaaccctgactaataatacaataacagcaatttttttaaaaaactgagatttcctactggcttgaagtttttctatttagcan

SEQ ID NO: 36708 - DNA, 403 bp, Homo sapiens
ttcttatggggttccttttatcttttaagaggcttttgggtcctaagataaaaaagtatgagaaacactgctctatttcacaagtgtcatgcattaactctaacatacaagttatgttggtaacattttccttcttgaagaaattactattcagcacaaatttttttttgctatatgaaatgattctggatctctcgatttaatatctcaatttttctagtgtacaatagataaaaatccctattcttgtgttcacacaggtatcatctgaaaattacaatagagcatcatttactatcctcttgatgactagtagaccaaatcttgaaagacttttactgtatattaatcttaggggctgtgactttccttttttatatgcattaagtttgacctcacatgg

SEQ ID NO: 36709 - DNA, 456 bp, Homo sapiens
aattaaaataaaggatatttatagtacaattggctctccatctctgcattggtgggtttaaccaactgtgagctgaaagtatttgggggaaaaaattctttttcttgtcattctctaaacaatacagcataacaactatttgcatagcatttacattgtactaggtattataagtaatctagagatgatttaaaatatacaggaggatgtgcatagattacatgcaaatactgaaggacagttgtatattgaaacatgtaacagctaatgtgtttatgagcacacatatatggatagttaaaacttgcactagaatgtttcaacaagtaagctactagttagcctctacagggatgagggggagtggaatggagggaagaccttcagtcattcctgtgatattctgtttcttaaaagaggcaaatatggagcagtctggagggtggtgtacatggg

SEQ ID NO: 36710 - DNA, 415 bp, Homo sapiens
  misc_feature (1)...(415): n = A,T,C or G
cccacgcgtncgcggacgcgtgttcggacgcgtcttacgcgtgggtcctgactcatctaaagccttggttctcacagtgtgggtcatggagcatcagaatcagctgggagcttgctagaaacgcagcattgcatttggaaatgggactagaagatttagagatgctgaaataattagaagcagtttttaaaaagataaagggctctggaagattcccagttataacaaaataaataatccaaacctgcagctgattgggacatgcagccctctggtttacccagtagggttagggatggatcttgtcccagcctcagtctcattcccgctgtgaacttgtaggctttgctcctgctgttctcaggaacaaagctgtcatggccatcacacacaacgtacctgaggcagcgcttgn

SEQ ID NO: 36711 - DNA, 398 bp, Homo sapiens
ggattgcaggcataagctaccatgctgggcctgaacataatttcaagaggaggatttataaaaccattttctgtaatcaaatgattggtgtcattttcccatttgccaatgtagtctcacttaaaaaaaaaaaaagaaaaagaaggggataatttcatctactgcctttacttggggttaaggggattcttaaacaccttcatcatggaactctaaaaggggggcccgttttggtttcctgggggggggttttgaaaaaaaagggaaagcacattttgagcatgtctgggtaccatggggcggatgcttgggaaccaaaactgtttcaaaggaatctgaagtctgattttatttttcaaaaacacaactttgtgtaaaacatgagaagaaatgatttt

SEQ ID NO: 36712 - DNA, 468 bp, Homo sapiens
  misc_feature (1)...(468): n = A,T,C or G
tgacgaatgggaacaggagatccgtctaactgagcaagccgtccaggccatcaacaagctgaaccccaaacccaaattcttcgttctgtgcggcgacctcatccacgccatgccaggtgtcagagtcgtgttctcaggccactaccacaggaatgccgggggtacctaccagaacctcgacatggtggtgtcatctgccattggatgccagctgggcagagacccccacgggctccgagtcgtggtggtcaccgccgagaaaattgttcaccgatactacagtctacatgagctgagtgagaaaggaatagaagacgatctcatggatttgatcaagaaaaaatgacgctccttcccgttcccgttcacttttcacttgcactatttttttattttgccagaaacagcagctgcacacaacctcttgctgaaatatanaaatagcccaggcaggtgtangtataggag

SEQ ID NO: 36713 - DNA, 423 bp, Homo sapiens
cggacgcgtgggcggacgcgtgggcgcgcgccggaagtacctacctgggataacggcggcgagcggacggctgcatttacggggtctcccggagggccagagtcgtggcttacagaagagacgaaatgtggtctgagggacgatatgaatatgaaagaattccgagagaacgagcacctcctcgaagtcatcccagtgatgaatctggttatagatggacaagagacgatcattctgcaagcaggcaacctgaatacagggacatgagagatggctttagaagaaaaagtttctactcttcccattatgcgagagagcggtctccttataaaagggacaatacttttttcagagaatcacctgttggccgaaaggattctccacacagcagatctggttccagtgtcagtagcagaagctact

SEQ ID NO: 36714 - DNA, 460 bp, Homo sapiens
ctgaggctaccctcagcataagtgatgtccgtaccctgagtgagcccccagacaagggggaggagcaggtcaacttctgtgagtcctccaatgactttggcccatatgagggtgggggtcctgtggcaggtcttgatgactcaggggggccaactccctcttcctatgccccctcccaccctcctcgaccgctccttcccttggacatgcagggcaaccagatcctggtcttcccgtcgtcgtcttcatcctcatactcacaggctcctggccaaccaccagggaaccaagcagaacacggggcactgaccgtggggggcacgtcggtggggagcctgggtgtgccgtgtaacgttggtggggtccctggagggactggcagtggggacgggaataaaatctttctgtgccattgtgggaaggccttctcccacaagagcatgcgggaccggcacgtgat

SEQ ID NO: 36715 - DNA, 388 bp, Homo sapiens
gttttccatggagaagcttgaaagccttcttacctgtcacagcttcatctcatgccgcgatgtagcctatcagaccgccggtgggcgccccagccaaggaggacaaggatagggcggaactacggaggatgcggggtgcgtagatcctgctgggataatccgtggggcggcaagcgctatacagccgccgtctccccagtgatactgcaaggtgccggtgccgccgccgccgccactgcagtaaatcagctgacaccagccccaactgccgtgactttcgctgcaactgtcgcaaaaatgagggggcgggaaagactcaccatttccctacatgcaaagcctaagccggcgccgagagagccagccgcgttacgatggagaccgaaag

SEQ ID NO: 36716 - DNA, 440 bp, Homo sapiens
ctcatgaaaccgactgggaaatcaccccccacagggacccccacccctcccagcctcactgcgccccgtcaggccaggcagctgccctcagggtctgccaaggtgggggtcaagggccatgggggcaggtagctctgcctgcaaagcccacaagcatgtcagatcacctgggctgcagacagacaaacacctgagctgttctgaataccttcaggttcctggcctcgctgagcaagtgcagaaatttttaccttcaaggatcagggtttttctgtttgtttgttttttaacacacacatatgtgaacaaagagtatgcgtttgtactggcagaagaagcgtctggtaagacaaccagcaagttaacaatggtcacctccagaaatgggctgggtaaaccaaagaatttttttgtttttgttttttttgagtcagggacta

SEQ ID NO: 36717 - DNA, 404 bp, Homo sapiens
  misc_feature (1)...(404): n = A,T,C or G
gcaattagagatcgaagcctcctatctccacatctctgaagaagttgaggggtgggggagagaatgacttctgccttcatctgcagtaacggggggacctatactgacctcttccccagccatttagaaacaagttctagggtgggttggaaaatctccaagagccctgacctcatcttccacctcagcaaccatgacctgaaacctcagcgtgaatttgggggatttttcagtggaacccttgcccccaaatgtcgaccagcccccaaatgtcgaagaattttcttcttgccaattttgttgtttaaaaaaaaaaattcagggaaaattaaaaacctggaactccataaggtactggcttccataatgtctgccaattctgaggaggatggtagtagaaagcn

SEQ ID NO: 36718 - DNA, 429 bp, Homo sapiens
  misc_feature (1)...(429): n = A,T,C or G
aaaaattacatgggcatggtggcttgtgtctgaagtccagcctactcaggaggctgagacgggagaataccatgagcccaggagttcaaggctggagtgcaatggcgcaatctcggctcactgcagcttccacccttcaaaattcaaattattttctaatttcacttttggtttgatctttgaccccatggatttagtttccatttatttgggggttttccagatatctttctgttattgatttcaaatttccttgtggtcagagaacatactttgtatgacttaaatcctttaaaatgtattcaggcttgttttatagcccagaatgtggtctgtctgagctgagttccatgtgtgcttacgaaaaatatgtctgtactcagcaatgtattgtgctgtttggtgctgggtggagtattctgttatgtn

SEQ ID NO: 36719 - DNA, 407 bp, Homo sapiens
tcttgtgctccagctggagctttggtcccgtattctcggctatttatccccagctgcgggaggccctggtgactctgctgctgcagtgtctggtttccctgtgacctgcaggtactgggagttacatagctaagatgccaggacaccccgaaagccggaaaacgggactactggcattcagtgatgtggtcatagaattctctccagaggagtgggcatgcctggaccctgcccagcgaaatttgtatagggatgtgatgttcgagaactacagaaacctggtctccctggctattttatcttattccattcaagaccttttgccagagcaggatatgaaagatttatgcccaaaagtgacactgacaagacatagaagctggggccttgacaatttgcacttagtg

SEQ ID NO: 36720 - DNA, 393 bp, Homo sapiens
cccacgcgtgcgcaaagttttgggactgttttctttttaataaagccacaggcaggcatcgtaactccgcagcccgaggggacacaggatggaaaccccaggatgagaagggagcagggagagttccacaaagggggatgaaataggagtattaaaaagctgcgttggtaagtttttcatggaaccaagatttgacaaaggcatctcttatccttggttttaaattcctgctgggagcaaggcctggtatgagcgccctgggtcttgtttttggtgtttcgcttttctgtaaggattaagcacatagggagaagggaaaaggggcctcactttagaatgaatgagtcaccttgtgatttttaaatttttattttaataaagctaatcaatttc

SEQ ID NO: 36721 - DNA, 505 bp, Homo sapiens
  misc_feature (1)...(505): n = A,T,C or G
cggtgccannnaaggaaaaactgaagcgtcgaactgacgacctccggggncgacccacgcgtncggttattctctttgccacaacaatttatagaattggattgaaagtgccacctgatgaaagggatcctcgagtccccatgctgacctggagcacctgcgctttcactatccaggcaattgaaaatctattgggagatgaaggaaaacctctgtttggagcacttcaaaataggcagcataatggtctgaaagcattaatgcagtttgcagttgcacagaggattacctgtcctcaggtcctgatacagaaacatctggttcgtcttctatcagttgttcttcctaacataaaatcagaagatacaccatgccttctgtctatagatctgtttcatgttttggtgggtgctgtgttagcattcccatccttgtattgggatgaccctgttgatctgcagccttcttcagttagttcttcctataaccacctttatctcttact

SEQ ID NO: 36722 - DNA, 452 bp, Homo sapiens
  misc_feature (1)...(452): n = A,T,C or G
cggacgcgtgggtaagggcacacaacactatatccctgccaaatgctattgccttgatgcattctgccatcacttcagcaatatgaataaagctctactacctctctttgcggggctatgcggaaatgaccatgttaatctacccatcatggagacattcttaaggaaagcgcgtcttcctcttggagctaccagttctaaagggaggagacaccaccgaatcctgggacttctgaattgcttgtctcattttgccaaccctaccgaagcactagataatgttctgaaatacctcccaaaaaaggatcgagaaaatgttaaggaacttctctgctgttccatggaagaataccaacagtcccaggcgaagctacaggacttcttccagagtggtacttatgtctggccagatgccttgaatcttgagttaccagaatgggtactagtggctn

SEQ ID NO: 36723 - DNA, 416 bp, Homo sapiens
cccacgcgtccgcccacgcgtccgcccacgcgtccgcatagagcaaattcggatatgaatgggcatgggatcattgatttttaaaaatacctattagtttaaatagctattttaagcatagaattttcaataccttacttggggtgccgggtttcaggatactttggaacctaagcaacctcattcttgaaagatagatttctgtacttaatagtaaatataaatttgaaatacacatttttccacaggtgaattttgaagtcttcatcagtatatccatattaaaacgagatgacagaagccaaagtaattatggcaagtaatgggttttatcttaactataagttatttgctcaagggtgtaatggtcattaccaaggcttttagaatgcagcttctcatttgctgtggacatg

SEQ ID NO: 36724 - DNA, 427 bp, Homo sapiens
  misc_feature (1)...(427): n = A,T,C or G
atcttctgtgttaccagtcactctgttgaaatgaactttccgaatctctttattcaggaaaacatggggttttgaaattcttgggccaagagacatatctgaggggttcgcagagctaggcaagggtgcactaggaaagggccacattggtgggtggggagtaacagagaacagatggtgtcaggaagtttctctggagtaaataatgtggatattcttggtttccctctcctccgccagctgaagctgtgttagtgctgttgacactaatataaaatgtttggtccatttgaaatccttgtcattgccttatatgggggaaactcaatcccccagcctgtgttggaaacatcaccaaactgattgtaaatgtgcggctgtagcagacattatagtgtggtggtgtgcagccatttcggccctacan

SEQ ID NO: 36725 - DNA, 421 bp, Homo sapiens
  misc_feature (1)...(421): n = A,T,C or G
cacgcacttagtctctaaagagtttattttaagacgtgtttgtgtttgtgtgtgtttgttctttttattgaatctatttaagtaaaaaaaaaaattggttctttataaaaaaacagaaaaaaaaattaaaggggggggcgcgcctcttaaaggactctttggggggccaaaatatccccgggagagcaaaaaaaaatttttttttttttgggggggtcattaatacccctcttgggaatttttgggaagaccccttttttttgggggggagaaaaaagtggccaccctcccccaaaaaattaaacgtctttgggggaaaaaaaaatttttaaggggtaaagggggaaaaactcaccccaattccttcctgttaaaaaatttctggccannaccgtaaagatccattttttttgtggggggg

SEQ ID NO: 36726 - DNA, 416 bp, Homo sapiens
gcaggcagctgaacgttaacaaagtcaagcatgctctctccacctcaaaccacattacatagaagtgtggctgctgtagctcctcagagaccaccaagtactggcaatgcaggtgggatgttgagcactacagacctcacagtgccaaaaggagctggaatcagtccactggggaatggatttgtaaactcaagagcttctcccaatttgattggagctactggagcaaatagcttaggcaaagtcatgcctacaaagtctccccctacaccaggcggtggtactcttggaatgaacagtatgaaaccagatcttcgagttggcatccccccttcaagcaagggcatgatgcctgcactagaaagttgaacctttcttcaacttcattctttataacacatatgttatacatagtg

SEQ ID NO: 36727 - DNA, 406 bp, Homo sapiens
gcacaggtgccggccctgcagcccccagaacccggactggagggggccatggggcgccggaccctggccctgccctgggtgctgctgaccctgcgtgtcactgcagggaccccggaggtgtgagtacaagttcggatggaggccaccgagctctcgtccttcaccatccgttgtgggttcctggagtctggctccatctccctggtgactgtgagcagggggggccccgatggtgctggggggaccacgctggctgtgttgcacccggaacttggcatccagcaatgggcccctgctcgccaggcccgctgggaaacccagagcagcatctctctcatcctggaaggctctggggccagcagcccctgcgccaacaccaccttctgctgcaagattgcgtccttcc

SEQ ID NO: 36728 - DNA, 405 bp, Homo sapiens
cagaagtcagcccagaccttcctgtctgagatccgatgggagaagaacatcacgctgggggagccccctgggttcctgcactcctggtggtgcgtcttctgggacctgtactgcgcggcgcctgaccgaagagaggcctgcgagcactccggcgaagccaaggccttccaggactatagtgctgcagccgcccccagccccgttatggggagtatggccccaggtgacacaatggccgcaggctccatggcggctggcttcttccagcccttcatgtcaccgcgcttcccagggggcccccggcccaccctgcggatgccgagtcagcctcccgcaggcctccctggctcccagcccctcctccctggcgccatggagccctccccacgagcccaggggcatccg

SEQ ID NO: 36729 - DNA, 421 bp, Homo sapiens
agaagttggcgtgcagctgggagagctagactaagttggtcatgatgcagaagctactcaaatgcagtcggcttgtcctggctcttgccctcatcctggttctggaatcctcagttcaaggttatcctacgcagagagccaggtaccaatgggtgcgctgcaatccagacagtaattctgcaaactgccttgaagaaaaaggaccaatgttcgaactacttccaggtgaatccaacaagatccgccgtctgaggactgacctttttccaaagacgagaatccaggacttgaatcgtatcttcccactttctgaggactactctggatcaggcttcggctccggctccggctctggatcaggatctgggagtggcttcctaacggaaatggaacaggattaccaactagtagacgaaagtgg

SEQ ID NO: 36730 - DNA, 414 bp, Homo sapiens
ttattataattattttatgcagtaaatagtcatttagatttgtataccgtggtcgtttctgttactttttattgcttttttggtttttctgcctccatctgagaatttgtttttttaagagttttttattatttaatgtagtgcacttacattagcaatgatttctgtcaggtttttttttttttaatctaaaaattctttctgttttaaaaaatgttatcactaggtataaaattctaggtgggcagtgggagtccatttttttgaaggaacattggctgccagttttattgttgcttttttgaaggaactgtattccccattcttttaggagttccttcagctatatcccacagcactttgctggcttgcttatttattggggggagtttattttatttttatgggtataat

SEQ ID NO: 36731 - DNA, 424 bp, Homo sapiens
aaatcacttatgctgaagtgaggttcaaaaatgaattcaagtcctcaggcatcaacacagcctcttctgcagttttctttcaaaaatattctcagcttcttgaaaaaaagactacaaaagagctggttcatacaacattggagtgtgtgaaaaaaaatatgcccgtggaagagacagcctggagctgttgcccaaagaattggaagtcatttagttccaactgctactttatttctactgaatcagcatcttggcaagacagtgagaaggactgtgctagaatggaggctcacctgctggtgataaacactcaagaagagcaggatttcatcttccagaatctgcaagaagaatctgcttattttgtggggctctcagatccagaaggtcagcgacattggcaatgggttgatcagacaccata

SEQ ID NO: 36732 - DNA, 444 bp, Homo sapiens
tcgtgttgcctacatgtccctggctgttgaggcgctgcttcagcctgcacccctcccttgtctcatagatgctccttttgaccttttcaaataaatatggatggcgagctcctaggcctctggcttcctggtagagggcggcatgccgaagggtctgctgggtgtggattggatgctggggtgtgggggttggaagctgtctgtggcccacttgggcacccacgcttctgtccacttctggttgccaggagacagcaagcaaagccagcaggacatgaagttgctattaaatggacttcgtgatttttgttttgcactaaagtttctgtgatttaacaataaaattctgttagccagaaaaaaaaaaaaaaaaaaaaaaaaggggcggccgttcaagagaacccttgggggggcccaagtttacgcgggctggcaaaaatttac

SEQ ID NO: 36733 - DNA, 455 bp, Homo sapiens
  misc_feature (1)...(455): n = A,T,C or G
accacgcgtccgggtattccttattccagcaacattatgatgtactcatctgctgtgaagtctttacgtgcattaagacaacaggttttagaaatgatcttacatctaatatagagactttaagcatcccgtcaaaggcagaatctgtcacttgaatgaaggaaagcttatagcccaagcagatcaaaataagagcccagcctatttgacttgcctgctgtatcttccctatttagtcgacccactttagcttatatgtgtattagtaaacatgaaatggcgaataagtgatggtaagtacatgccatacatttaaagatctttgatgattgttatttttgtggcagataattcctctagaatgtgtatctttttatgatctagatgaagaaaattgtacaactcttaacaccccacaccaatcttagtttcattacttntacacacaccattgt

SEQ ID NO: 36734 - DNA, 399 bp, Homo sapiens
caacggaggaaaaggcaactcatagaatgggagaaagcatttgcaaatcatttatctgatgagaggttgtattcagagtatatacagaacacctaaaatgccacaacaataaaacgacttaattcaaaaatgggcaaaagacttcaatagacttttggaatttctccaaataagctgtacaaattgtcagtaagtacatgaaaagatgtttaacatcactaattattagggaaatgcaaatcaaaacgacctcatacccgttagggtgactactatcaaaacaacaacaacaaaacccccaggaaataaccagtgttggtgagtatgtggtaaaattggaactttgtatactgttagtgagaatgtagggtgatgaagccactgtgaaaaacagtacag

SEQ ID NO: 36735 - DNA, 417 bp, Homo sapiens
tgaaacagatatgttaaatactgagtctagttttcttccatcttatggagcttcatggaataagaaactaatctagtgcaaatgaagattaaatatttctgggtgatggagagatagtcaacaaatttatttatccatcctctgcacatcagtccactggagcaggagttctacacattaaaaatgtaatgggatcagcctagcattgtttggtgttcttttgttgtattttttagaatgggggtgggggcctaagtgtccttatgaagctgtggtccacgacaggagcttgttgggggagtaccagggttctgctgctttcctgcatctgagcaacacaacagagatcatcagttttaaatagagtagccctcacaatcaaaatatcatagaatatattgtaaagttatgttgcta

SEQ ID NO: 36736 - DNA, 475 bp, Homo sapiens
cggacgcgtgggttctcatctccggtgaagctgaaggggcctgtgtccctgaaagggccagcacatcactggttttctaggagggactcttaagttttctacctgggctgacgttgccttgtccggaggggcttgcagggtggctgaagccctggggcagagaacagagggtccagggccctcctggctcccaacagcttctcagctcccacttcctgctgagctcttctggactcaggatcgcagatccggggcacaaagagggtggggaacatgggggctatgctggggaaagcagccatgctccccccgacctccagccgagcatccttcatgagcctgcagaactgctttcctatgtttacccaggggaccttctttcagatgaactgggaagagatgacatgttgtttcatatttaaataaggctgaacattagaaagcaaaaaaaatcaaaacggcccccctgtctaag

SEQ ID NO: 36737 - DNA, 465 bp, Homo sapiens
  misc_feature (1)...(465): n = A,T,C or G
natgagcccctgagaacntctccggaanncccgggncgacccacgcgtncgcggacgcgtgggctggagcccgaggtccccgcgcggcccgggcctggcgccctgaggggaagagcggcccggcccgagggtgctggggtggagagttttactccaatacctttcctagccatgacggacgggatcctagggaaggcagccacaatggagatccctatccacgggaacggcgaagccaggcagcttcctgaagatgatgggctggagcaggacctccagcaggtgatggtgtcaggacccaacctcaatgaaaccagcattgtgtctggtggctatgggggctctggtgatggactcatccccacagggtctggccgccatccatctcacagcaccactccttctggccctggagatgaggtggctcggggcattgctggagaaaagtttgacatcgtcaagaag

SEQ ID NO: 36738 - DNA, 474 bp, Homo sapiens
  misc_feature (1)...(474): n = A,T,C or G
tagtgaaaatctgaggctgacggcantggcgaggaancnccggggcgacccacgcgtccgcaaatggtgttttgtaccccataagttatcccttatgcttctgtgacttctgtgaaatctttgtttttaagtgccagtaacaaattttagaccatctagatgagggtagagagagcttatgcattgtttttatacatcactgttgatctatacaagatttgagttatcagaagggttttgcttttatttgcatatgaaatttttattaacatgaatatgggcacagagcaaatagcttcttagactgctgccttctgaaggtggcttctgtatctttctcagaggaggaggaatagacttaaacgacttctttgtcctccttcaattttttttttaatgaaaaagtatactagggcttaggcatgtgtgatttacagttatttgttctgaaggctgcagagaattgaaaatccg

SEQ ID NO: 36739 - DNA, 407 bp, Homo sapiens
atttatgacctgaaataatatatttcttcttctaagaagacattttgttacataaggatgacttttttatacaatggaataaattatggcatttctattgaaatttcaatgcttttatttctttggcaaccacacccaatccctctcccactagtgaactagggaagaatttcgacaagggcctgcagaatgtgttgagatctgatcccatgccctgtggtggcccgttggtcccatgaaatggctgggttgcaagggaggaagacaagtgagtatcatgaaacaccggacgctacagctgaactcttagtattggatcagtgtgtctgcccatgcccattttagcggctctgtaacctaccatgtcacccaggatgccaaggtgtccccagagccaaagctaggag

SEQ ID NO: 36740 - DNA, 394 bp, Homo sapiens
  misc_feature (1)...(394): n = A,T,C or G
gaattgaatgtcagccacctccctctgccagacgggagagccaggcttggatggaacatgcccacaacttgtcacccaaagcctgtcccaggactcaccctccacaaagcaaaggcagtcccgggagaaaagacggatggcaggatccaaggggctagctggatttgtttgttttcttgtctgtgtgattttcatacaggttatttttacgatctgtttccaaatccctttcatgtctttccacttctctgggtcccggggtgcatttgttactcatcgggcccagggacattgcagagtggcctaaagcactctcaccccaagcggccttttncaaatgcccaaggatgccttatcatgtgactcctgaagggaaggcaaaggcagaggaatt

SEQ ID NO: 36741 - DNA, 491 bp, Homo sapiens
  misc_feature (1)...(491): n = A,T,C or G
tgagctnccattgaacgccctcggtagaggtccgtaagtccaggggcgacccacgcgtgcgcctttcttaattgacagtgacattatatctgcaaaatatgcttcatacctattgtgttagttttagtttcctaggcctgctgtagcaaagcaccacaaattgggtagcttacaataacagaaattgtttgatagttataaataaaggtcagatgtctaaaaccaaagtgttggcagggccgtccctctgaaggcactgaaaaaaaaatttccagtccttctaatttcttgtggttccttaacttgtggcagcataactccagtcttcacatgaagttcttcctgtgtgtgtatctgagtcctaatataaggagactagtcatattggattggggtccatcctgctctgttaatgacctcatcttacctgctgacatctgtaatgactctattaccaaataaggtcacagtatgaggtagtaggggctaag

SEQ ID NO: 36742 - DNA, 413 bp, Homo sapiens
cacaactgtgtttactatcaacctcaaacagacaccatggtgcacctgactcctgaggagaagtctgccgctactgccctgtggggcaaggtgaacatggatgaagttggtggtgaggccctgggcaggctgctggtggtctacccttggacccagaggttctttgagtcctttggggatctggccactcctgatgctgttatgggcaaccctaaggtgaaggctcatggcaagaaagtgctcggtgcctttagtgatggcctggctcacctggacaacctcaagggcacctttgccacactgagtgagctgcactgtgacaagctgcacgtggatcctgagaacttcatgctgctgggcaacgtgctggtctgtgtgctggcccatcactttggcaaagaattcaccccacc

SEQ ID NO: 36743 - DNA, 472 bp, Homo sapiens
  misc_feature (1)...(472): n = A,T,C or G
cggaggtaannaactgaagctggtaatgagccctaggaaaggctcgacccactcgtncgcccacgcgtccgcccacgcgttcgtgtgtcccgcgcttggcgcagcatgaagcggcggcgaacgcggcctgaattcccggcgccggccccagctcctctgccgctgccgccatgctcgacttcttcaccattttctccaagggcgggcttgtgctctggtgcttccagggcgttagcgactcatgcaccggacccgttaacgcgttgattcgttccgtgctgctgcaggaacggggaggtaacaactccttcacccatgaggcactcacactcaagtataaactggacaaccagtttgagctggtgtttgtggttggttttcagaagatcctgacactgacatatgtagacaaattgatagatgacgtgcatcggctgtttcgggacaagtaccgcacaaagatccaacagcg

SEQ ID NO: 36744 - DNA, 418 bp, Homo sapiens
tggtttttcggatcatgtctggcggctccgcggattataacagagaacatggcggcccagagggaatggaccccgatggtgtcatcgagagcaactggaatgagattgttgataactttgatgatatgaatttaaaggagtctctccttcgtggcatctatgcttacggttttgagaagccttccgctattcagcagagagctattattccctgtattaaagggtatgatgtgattgctcaagctcagtcaggtactggcaagacagccacatttgctatttccatcctgcaacagttggagattgagttcaaggagacccaagcactagtattggcccccaccagagaactggctcaacagatacaaaaggtaattctggcacttggagactatatgggagccacttgtcatgcctg

SEQ ID NO: 36745 - DNA, 404 bp, Homo sapiens
  misc_feature (1)...(404): n = A,T,C or G
cggagaacgctggtgggcctgttgtggagtacgctttggactgagaagcatcgaggctataggacgcagctgttgccatgacggcccaggggggcctggtggctaaccgaggccggcgcttcaagtgggccattgagctaagcgggcctggaggaggcagcaggggtcgaagtgaccggggcagtggccagggagactcgctctacccagtcggttacttggacaagcaagtgcctgataccagcgtgcaagagacagaccggatcctggtggagaagcgctgctgggacatcgccttgggtcccctcaaacagattcccatgaatctcttcatcatgtacatggcaggcaatactatctccatcttccctactatgatggngtgtatgatggcctggcgaccn

SEQ ID NO: 36746 - DNA, 140 bp, Homo sapiens
cccacgcgtccgcgcaagtacaaggtgaagctggtggagaagcgggcgttccgtgagatccagttgtagctgccatcagatgccggagactcgcccttcaataaaaaaatctcttctagctgataaaaaaaaaaaaaagg

SEQ ID NO: 36747 - DNA, 425 bp, Homo sapiens
  misc_feature (1)...(425): n = A,T,C or G
ctggagacgacgtgcagaaatggcacctcgaaaggggaaggaaaagaaggaagaacaggtcatcagcctcggacctcaggtggctgaaggagagaatgtatttggtgtctgccatatctttgcatccttcaatgacacttttgtccatgtcactgatctttctggcaaggaaaccatctgccgtgtgactggtgggatgaaggtaaaggcagaccgagatgaatcctcaccatatgctgctatgttggctgcccaggatgtggcccagaggtgcaaggagctgggtatcaccgccctacacatcaaactccgggccacaggaggaaataggaccaagacccctggacctggggcccagtcggccctcaaagcccttgcccgctcgggtatgaagatcgggcggattgnagatgtcacccccatcc

SEQ ID NO: 36748 - DNA, 478 bp, Homo sapiens
  misc_feature (1)...(478): n = A,T,C or G
gganccaanattgatcgcctcgcggaccgttgaggaccttccgggtcgacccacgcgtccggcttattagatacctttttgagttgagcaagctattgtactgtattatacaatgatgtcctgaaagaagctattgctttttgagtttcttgaatcatctttgcaagtttttctactttgttgttattgttgttctaaagaaggggtctcactatgttgcccaggctggccttgaactcctgagctcaagaaatcctcccacctcagccgagtagctgggactacaggcaggcactggctccaagttcttcttccttggttgccccttcttactgccatttctgtacctgtccacctttctaatttgctgctgctaaactgcccaggctaaggaattgtgaaactagtcacatgggactggattcagaaaaaaaagataattggctctaaagcaaaagaaggcttaggggctctcgaa

SEQ ID NO: 36749 - DNA, 416 bp, Homo sapiens
agagaaggattaaaacggcctttccaaaacgactctttgtcagtgcacttccattaatcacctcttcaaatgagatagtaatatctctttttgcatttttcatttttgcctcacccttactggagaagagaagatgagaaagacagtcccaggagtgtctggtatctgcagccacagggggaaaggaaagagaatacaaattgtcattgtgtcagtagttcttatggctaccacattgggggcagctgtcattgattaatttgagaactccttctgcgatctgttgtccattgttcaggatacatatctttggctgttattttaacatttatttatgacacttgtttctacttactttgacatttggatactcactattagcaacatcttatctttttaattactgttttgcggct

SEQ ID NO: 36750 - DNA, 451 bp, Homo sapiens
  misc_feature (1)...(451): n = A,T,C or G
agtagctccttggttttgcctctttaaattatgacgtgcacaaaccttcttttcaatgcaatgcatctgaaagttttgatacttgtaacttttttttttttttgggtggcattggttaaaaaaccagggtttaatttttggaaccttttgggttatggccctggggaacccggacagcccctggggggccaccccttgtaattcaaaaggggggataataaaaggccaacctttaaaaaaaaaggtttggaaatccagggggaaaaaaaaggcggtttgggggaaaaaaaaaaaaaaaaaaaaaaaaaaangggggggggccttttaaaaaaacccttgggggggccaaattttaccgggggagggaaaataaaattttttttcttaaggggggcgatattaaaaacccttcgggatttttggaaaaaaaccctttttttggggggggaaa

SEQ ID NO: 36751 - DNA, 414 bp, Homo sapiens
cggacgcgtgggttttgtatattgtgtatctgtatcaaaaatatcctctccttttcaaaaatgacaggttggaaaatgtttgtcagacttattaactggtcatattataataatactgataatgaccaactgctcattctgaaagccaaacataaaagctaggagaagtggcatctgaacatttttgctttgctgccagagtaaccctgactaataatacaataacagcaatttttttaaaaaactgagatttcctactggcttgaagtttttctatttagcaaaataattagtaataagttttgactaggtctaaagaatgaacacattgtaaacagttgccacagtagtttctaataaattgatcataaaagcagctatcctttttttttttaattctagcttctttttaag

SEQ ID NO: 36752 - DNA, 404 bp, Homo sapiens
  misc_feature (1)...(404): n = A,T,C or G
cggacgcgtgggcggacgcgtgggcaataagacagtttctgcccaaagtcatgttaccagttggtgacagagctggaaatacgtagagatctatacccttaaatctctccactcacatgctgatatactttctactacaatatgctatagctttatggaactcagggtgatgatcagacgtgtcattagaacatgagtcctctgcttctgattcaggcatacttttgggattcttccatctttaaaggaaaaaggaagccattcatctatatttagtaacccagtaatatctcacttagtttagggttagatctttagttaattcaaccttatagatcatacttatgaaggtgataactgacacgtgttcactgaattttaatttgataggcaatacatctacn

SEQ ID NO: 36753 - DNA, 418 bp, Homo sapiens
  misc_feature (1)...(418): n = A,T,C or G
agccagcgcaggggcttctgctgagggggcaggcggagcttgaggaaaccgcagataagtttttttctctttgaaagatagagattaatacaactacttaaaaaatatagtcaataggttactaagatattgcttagcgttaagtttttaacgtaattttaatagcttaagattttaagagaaaatatgaagacttataagagtagcatgaggaaggaaaagataaaaggtttctaaaacatgacggaggttgagatgaagcttcttcatggagtaaaaaatgtatttaaaagaaaattgagagaaaggactacagagccccgaattaataccaatagaagggcaatgcttttagattaaaatgaaggtgacttaaacagcttanagtttagtttacaagttgtaggtgattaaaatc

SEQ ID NO: 36754 - DNA, 469 bp, Homo sapiens
  misc_feature (1)...(469): n = A,T,C or G
gggcaggnnnnnnnnaactgatcgccctggatcgcctcgaanntccggncgaccccgcgtncgccagatcctggtggctttgagacaccttcacttcaagaacattgtccactgtgacttgaaaccagaaaacgtgttgctggcatcagcagacccatttcctcaggtgaagctgtgtgactttggctttgctcgcatcatcggcgagaagtcgttccgccgctcagtggtgggcacgccggcctacctggcacccgaggtgctgctcaaccagggctacaaccgctcgctggacatgtggtcagtgggcgtgatcatgtacgtcagcctcagcggcaccttccctttcaacgaggatgaggacatcaatgaccagatccagaacgccgccttcatgtacccggccagcccctggagccacatctcagctggagccattgacctcatcaacaacctgctgcaggtgaag

SEQ ID NO: 36755 - DNA, 497 bp, Homo sapiens
  misc_feature (1)...(497): n = A,T,C or G
tggtgnatnnacactgatcgctgtcggnatcgatcngcattnnacggggcgacccacgcgtgcgaagaaccacacatacgaagacccagcctgtgcaagcaagacgcctgggctgatgtccctcctgtctgtgccgatctctattaaaggactccctcttggtgggcctggccgagtccctcctttgtgctaccagggactatatactcctcgtaagccagcgacctgcctaaagcttgggctgtgcctgcaaagcttgtgcaggacctgggggccaggtcgaccttcatgtggcttttggcgccccaggttgagctctggatgttacaagccaaggctcggctattcccccccatagtaaatttccttttccctggaattttccaagttggcttcagctgaagagctgttttgtgaagcatcccaggcttgcccaggagagacatttgccactatgtcaccttatctgggcttgccctggggcactgagacagttg

SEQ ID NO: 36756 - DNA, 414 bp, Homo sapiens
aaaaagaagaaactagatcagagacaactatattgcaagagataattgacttacaagagttgatattggaattgctactttaactcagtgtaacttagagaagtttcgatgagacttaaaatccttggcctttttgctgagattctttggtaacccttggcttatttatatatgttttaaaagaatttattgtacctgtgagagtgaattaaatttctagagagtcataaaagttgaagctgagttaaataaaaagttaattgtattggcgaataattcaaaatgtgctttaagtataataggtttttaaaaatcatcttttttaaatgaacaggaaactctgatgaggaagaaagtgcttcagaatctgaactttggaagggtccactaccagagacagatgaaaaatcacag

SEQ ID NO: 36757 - DNA, 380 bp, Homo sapiens
caaaagtcgcatcgctaatgatatttgccaagttgagtgtacacaaagtttctcatatcctgttcaagttaatcaacatcaagcacatggggatgctttagggtgagtctatagtacaaaatgcataaaccatgtccccaggaaatttgaaaggaagcaggtgctgaatggaatttttttccttttccatgagctgtgttaattctatctccagtaggcctaatgcttgaataagcaagatgtctaatcaataaattattttcatgctcagaaaaaaaaaaaaaagggggggccgttttaaaggatccctggaggggccaaagtttacccgggcttgcaaggttatagttttttccttatagggagccgaattataagct

SEQ ID NO: 36758 - DNA, 397 bp, Homo sapiens
gtctcctttgattggccaaaatgtggtgattagcacaagagtaggttacagtctgcttatgcctccatttaggtaacagttcatgattttcagagaaagctttaggctggacttaaaatatgtaaggaggcaagtttaggctaaagttaatttaacaatctccctttttggtcatcttctcaattttgagagattgaccaaaactttagtcattgatgtaactatcaccatcataaatgtccttatttggtttcaaaacccaccggaaaatagcataatagtggattttgtaagataggaacaaggacttcggtaatttttttttacgggttagagtagagggtacctcctcatgctggaatatcctgtttacaggagaaaaacaaaacctagtctg

SEQ ID NO: 36759 - DNA, 429 bp, Homo sapiens
  misc_feature (1)...(429): n = A,T,C or G
tgcactgctgagagcaagatgggtcaccagcagctgtactggagccaccctcgaaaattcggccagggttctcgctcttgtcgtgtctgttcaaaccggcacggtctgatccggaaatatggcctcaatatgtgccgccagtgtttccgtcagtacgcgaaggatatcggtttcattaagttggactaaatgctcttccttcagaggattatccggggcatctactcaatgaaaaaccatgataattctttgtatataaaataaacatttgaaaaaacccttcaaaaaaaaaaaaaaaaagacacacaaagaataaagaaatacaaaaaataacaaaaaaaatcttttttggggggggggggcggtgtaattaaacaaagggggggggggccctctctcttttcttggggggcgtgaccaacctcaaan

SEQ ID NO: 36760 - DNA, 416 bp, Homo sapiens
tgggaagactgtcactctcaagagcttcatccccgactcaggcactgagttcatttcactgacacggcccctggactcccacctagaacatgtggattttagttctctattgcactgtctcagttttgaacagatacttcagatctttgcctctgccgtgctggagagaaaaatcatcttcctggcggaaggtctcagcaccttgtctcagtgcatccatgctgctgccgcactgctctaccccttcagctgggcgcacacctacatccctgttgtccctgagagccttctggccaccgtctgctgccccacccccttcatggttggagtacaaatgcgcttccagcaggaggtcatggacagccctatggaagaggtcctgctggtcaatctttgtgaaggaaccttcttaatgt

SEQ ID NO: 36761 - DNA, 422 bp, Homo sapiens
cggacgcgtgggcggacgcgtgggtgacgatgcacttttatgaatgtagtttctatcgctgtttttagccttttcacatcatgtaatgtgaggccttgtacttgttaatttatatctcagatcatatttgatggtttttatatatatcaattctagactgttacaggtgacggacgcctcaagagagagaagagaaaatgaaagcagctggttttgcagaagtgtgtgtcgcatgcgccagttgggcctggaccctcctgtgtccatccctgttcccccaggggctctatcagcccctgtaccccacactgccctctgaagacaacacaggctcctgcttccacctcggcccttgcccagggtggggcctggccctcatcttgaccaaagctgctgtgtggcagctcggcctctctacgacc

SEQ ID NO: 36762 - DNA, 407 bp, Homo sapiens
  misc_feature (1)...(407): n = A,T,C or G
aaaaattatttgaaatgttagtttggcagttatgttggattatatacgtttcttaaggctagtgacttgtttcctggaattctttcacttcatagggtaacaccttgccccctactaggaacttaactatttctttaattttattacattgaagctgcttgaggaagcatgcttttttcactaaaaggacccagcaaatttcattctttcattggaatattttctcttaatatgactgcaaatgcagttagtaagttgaaaaagccacctgttgtcgtattggcaggccacctaactggtctgtctgtacttggtgtgcagggaagcttgaataactaccattaggcctgcacagtgtcagatttcacatactcatgacaccgtangtaattgggtgacagccagtt

SEQ ID NO: 36763 - DNA, 400 bp, Homo sapiens
  misc_feature (1)...(400): n = A,T,C or G
gaaaagtattctaataggctctacatgtatgatcacaactttgtgaaagctatcaatgccattcataagtcttggactgcgactacatacatggaatatgagactcttaccctgggagatatgattaggagaagtggtggccacagtcgaaaaatcccaaggcccaaacctgcaccactgactgctgaaatacagcaaaagattttgcatttgccaacatcttgggactggagaaatgttcatggtatcaattttgtcagtcctgttcgaaaccaagcatcctgtggcagctgctactcatttgcttctatgggtatgctagaagcgagaatccgtatactaaccaacaattctcagaccccaatcctaagccctcaggaggttgtgtcttgtagccagn

SEQ ID NO: 36764 - DNA, 422 bp, Homo sapiens
  misc_feature (1)...(422): n = A,T,C or G
gcatgtgcctgtaatcccagctactcaggaggccaaggcaggagaatcacttgagcccgggaggcagaggttgcagtgagccaagatggcaccactgcattccagcctgggcaacagagcaacaacaacaacaacaacaaaatatatatatacacacacacacacacatatgtatatgtatatacacacatgtatatttttatgtatgtttcagaacatgtattctctaatggttggtgcagaagtctgtacgtgtccatttacatttaatcagtcttaataatacgtattttaaatctttcagtcatttccaattattttgtctaattatttactaagagagacatgttctatttgctactatggnnggagattttccattttccctttagttctgncaattgtaggtgactaaaagttgt

SEQ ID NO: 36765 - DNA, 416 bp, Homo sapiens
tgctggtgttggtgaatttgaagctggtatctccaagaatgggcagacccgagagcatgcccttctggcttacacactgggtgtgaaacaactaattgtcggtgttaacaaaatggattccactgagccaccctacagccagaagagatatgaggaaattgttaaggaagtcagcacttacattaagaaaattggctacaaccccgacacagtagcatttgtgccaatttctggttggaatggtgacaacatgctggagccaagtgctaacatgccttggttcaagggatggaaagtcacccgtaaggatggcaatgccagtggaaccacgctgcttgaggctctggactgcatcctaccaccaactcgtccaactgacaagcccttgcgcctgcctttccaggatgtctacaaaa

SEQ ID NO: 36766 - DNA, 401 bp, Homo sapiens
gatgtgacttccacctccaaattccatttaactgattcttttaaaagaaagataggcgtatatacaccacgccaaaataataataaggtacctatgtgagaattgcaaattataccccagggtagcatttaggcagcgtcggcaaaaagtgagttaataaatcagaagctacatattaaaaaaaaaatcagtcaatccgtcgtgtgtttaattcttgcctaaagtaaatggagatattgttttgctttggtaaccagcaatttttaatttttttttattgcccgcaaattgagattgttttgttaaaatctgttgatctagcagcaagtagaattattcaactggaatcttgtattctattcagagcttaattttccgttaaggaaaaaaatgagcttcag

SEQ ID NO: 36767 - DNA, 426 bp, Homo sapiens
cccacgcgtccgcgccgagtcgcgcggaggcggaggcttgggtgcgttcaagattcagcttcacccgtaacccaccgccatggccgaggaaggcattgctgctggaggtgtaatggacgttaatactgctttacaagaggttctgaagactgccctcatccacgatggcctagcacgtggaattcgcgaagctgccaaagccttagacaagcgccaagcccatctttgtgtgcttgcatccaactgtgatgagcctatgtatgtcaagttggtggaggccctttgtgctgaacaccaaatcaacctaattaaggttgatgacaacaagaaactaggagaatgggtaggcctttgtaaaattgacagagaggggaaaccccgtaaagtggttggttgcagttgtgtagtagttaaggactatggcaa

SEQ ID NO: 36768 - DNA, 463 bp, Homo sapiens
aagaaactagattcctattaagtaaaagcctattaaaatagcatttcttattctgcaaaaaagaattttgagtcaaatatctgggaaaggctatatatcacactcagagagatataacacatattagcctatttaaatttctaaaacaatccaggaaataaatgtttaattttctgtttagcttatctcttttcttgtataagaactattaatattcctcagaactactagtattcagaataattttggaaaatgctggacaaaacaaaccaaaaaagctgtgttataaagaacaggatgcccaattctcatttaagagtcccagtttttggcacaagacagggatggcctctctcaccactcctattcaacacagtgttggaagttctggccagggcaattaggcaggagaaggaaataaagggtattcaattaggaaaagtggaagtctaattgtccctgt

SEQ ID NO: 36769 - DNA, 396 bp, Homo sapiens
cccacgcttacggggacgcgtgggtttgccaaaaccaacattttgaaggaaatgagtggccagcgccagggcccaagccatgtggcctgcccagactcaatgtcacttggtggcagggtggggtgggggtgggcaacaacatcccaaccttgagatgcttcactttccttctctgtaaccagactttgaaaaattggtcgttacatcaagctctgtttctcaatggccttttgctacgtgcctcccgagaaatttgtctttttgtataaatgacaaggagttgaaaatgtatatcctgaaataaatgtttcagatgcagacacccaaaaaaaaaaaaaaggggcggccactatagagaatctttatgggggaaaagttttacgaagctgtggaaaa

SEQ ID NO: 36770 - DNA, 405 bp, Homo sapiens
  misc_feature (1)...(405): n = A,T,C or G
cccatgtgctgaaaatccgaagtgccgcggaaagtggaggtgagggccgcccgccctagaggtgcccgtccgagaggcaggtgcgggaagagcctatccttttccctggccatggctcagtcgcctccccagggtttatttgcaccggaagtttggagcgggtgggtgctgaagacagctaggccttggcgatgtctgggatgaggctggtgggggaagcctttggagccgtgacctgagagggcagaccttcgaccccactacattgcactgcgccttcagaacatgcagggaaaaccccactgcgggacgctcaccagcagcatctccagattgtgaagggaaagaagggaaggatctcgggggcatgcaagctgctctgggctggggtggntcagacctggg

SEQ ID NO: 36771 - DNA, 413 bp, Homo sapiens
cccatgtatttaacttttttttaggatttttgcttttgtgatttttttttttttttttggaacctggcctaacaggcttgggctgaaaaaatagtaaccggggaaaaacctggaaaggagggctacctttgttaaaggccttagaaaatttccatgaccaccccaaccttattggtaaaaaccccgtgttttaaatccttgtagggggaaaaaaagttttatgaagggaaaaaaaaaaaaaagggggggccctttttaaagatcccttggggggcccaaattttcccggggttggcaaggttttattttttcccttatgggggcccttttaaaaccctccttgggatttttgggaaggaacctttctttggggggggggccttatgggccccccccccccccggaatttaacg

SEQ ID NO: 36772 - DNA, 411 bp, Homo sapiens
cccagggcagactggtagcaaagcccctttccctttcggagcaccgccgaggactccagcacaccgagggacatgctgggcctgcgccccccactgctcgccctggtggggctgctctccctcgggtgcgtcctctctcaggagtgcacgaagttcaaggtcagcagctgccgggaatgcatcgagtcggggcccggctgcacctggtgccagaagctgaacttcacagggccgggggatcctgactccattcgctgcgacacccggccacagctgctcatgaggggctgtgcggctgacgacatcatggaccccacaagcctcgctgaaacccaggaagaccacaatgggggccagaagcagctgtccccacaaaaagtgacgctttacctgcgaccaggccaggcagct

SEQ ID NO: 36773 - DNA, 404 bp, Homo sapiens
cccacgcgtccgcggacgcgtgggataaatgtttgattgaatgttatacacagaggataccccaactggctctgggaacatgtataaaagacacctcaccctccttcaaggtctaagagagggaaacactgagtttgattaggaaaataaggttattgctactggaactttttggcatttgtgaagaatcagactagaggggtattaaagtagttttgaactatgaattagcaaatgaatttaggtctgctccattgtgaaagttgatagtacttaacctgactggattgtccctggcagaatattttctggaagactgcattcagatgacccactttgttcctccaccaaaagacaaaaagaagaaggataaggatgatgatggtggtgaggatgatgatgta

SEQ ID NO: 36774 - DNA, 420 bp, Homo sapiens
acgtggtgcgtggccttcaccacgcatcttgagcaaattaggaaaatgtacccttcgcttgaggcagatgcagcccttccccccagtgcatggcttggagagcagaatgtgggctgcatataagcacactcatccctttgtctgggaatctttgtgcagggcataacaggcttagtaagtccaaacacagatgacagtgctgtgtgggtctctgtcagagttgtggctctcagccatgtagacacactctccaaatggagtgttggaaaatgttctttctgcagggtctagagactgctgggacacttttcttggagtgctacttcagaagccttataggattttcttcctggccaagatttccttctgtatcactccaagcagcctcagcagaagaagcagccatgcccagtattccca

SEQ ID NO: 36775 - DNA, 402 bp, Homo sapiens
agagaagagacgtatgttttatatggatgtgcatattgcagtaacttaaaatgaacaaaaatctggaacaaccattctgtgtttatagttttttgacacctttaaacttgtttttcttcattttatacagaactctgtgtattccctgacagatttgtggtttgtgtcagtcagcttgcattcagtcgtgatcttttagcaagtcagaatgaagatttggtgagtatgaaaaaattctataaacaaataagtctgcttaaatgctgagttactgtaaaaaatagaaaacaagaattgtctgctgttgtcattcagctgatgagcacccaacgcatgttttaagggaacaagaagccctacctgttttacgtggtaatatcaactaattcgtgtattgttctt

SEQ ID NO: 36776 - DNA, 406 bp, Homo sapiens
ctcctccctccagtccctgtgcgagggtcagcagtgagcattctgactttgccttctctcagtgatcctttctcctaagagcacagccttgccctctccctcctggtgcttcatccatgagagttcacctagctgttttcctgagaaagactcctcagctgcctgtgtgacttcacctggaagacagggagaatgtgcccacaggtgactgcgaaggtccctgtaagtcctctgtgtactgtgtgacgggctttctcccacccaggctacagccccgttcccgagggtgtgcaatatcctctagcctttgttttatcttttggtatttctactcagaccagtgtaggttttggcccaagctaaataccttaaaactgactgaagatggagatgatgtgatgatggg

SEQ ID NO: 36777 - DNA, 519 bp, Homo sapiens
  misc_feature (1)...(519): n = A,T,C or G
ggttacctaggaaccacncggngaaaaaanattgatngccgtcgatccccnctcgaatccccggtcgacccacgcgtccgatgttttatgcttatgtggaaatgaagaggaaaaaacgggttcattttcatggtttcatgctagatgtgcacaaaagaatacatcgccttaaacagagtttgccaaaaaggaaaccaggattcatggctaaatcatatgacccaatagctcccatagccgaagaaatcagcgaagaagcatgtctcctatgttttgatgaatttcaggtcactgacattgctgatgccatgattctgaaacagctttttgaaaatctgttcaaaaacggggtcgtcgttgtggcaacatccaacaggccaccggaagatctctataaaaatggactccaaagagctaactttgtaccattcatagcagtcttgaaggaatattgtaatacagtccagctagattctgggatagattaccggaaaagggaacttcctgctgcagganaan

SEQ ID NO: 36778 - DNA, 397 bp, Homo sapiens
tcagctgccgagctggcccaggcgctgccgcagatgggccggttgaaaagagcgcacctggagaagaatgcaaatctcacttttgggggcctggctactggctgaaggactggcccaagggtctagcatacaactcatccgcctctggaataaccccattccctgcgacatggcccacctcctgatcagccatgagcccagactggactttgccttctttgacaaccagccccaggccccttggagtacttgatggccccctcaagacctttggaatccagccaagtgatgcaccctaatgatccacctttcgcccactgggactgatgactcaggaaagaagagccttggctgggcgctctgctctccacccaggaggaacgattcgtgtgtgctg

SEQ ID NO: 36779 - DNA, 456 bp, Homo sapiens
tttgtatactatgtaagcagttttatatcagctttgtaaaatctttggtgttaagagtcaatattttttggctttgtagataaagacttaaatttttgtgcaacatagtggtgttaaagcacacatccattggactatgcaaatcaatttctactagcagcactgagcaactgggcacgtgctagtacgcaccccctcctactctaactgtgctagctcttgggttgaggaatggaatgggtagccttctgcttactggagatgcacagagaaacatggctgaaaacagctttaaaaagaacatgtctttgggttcatgtgtggtgctgctgcccgggtgtaaactatccccacccagggccagccattatcaccagacctcttctgggcctggctgtgaagccctgtttttggtattcagaatggatctttaaagctcagatgggctcaaattga

SEQ ID NO: 36780 - DNA, 459 bp, Homo sapiens
cggacgcgtgggtaaaaatgcaaaaattagccgggcgtggtggcgggcgcctgtaatcccagctacttgggaagctgaggcgggagaatcatgtgaacccgggacgcaggggttgcagtgagcggagatcgcatcattgcactctagcctgggccacagggcgagactccgtctcaaaaaaaaaaaaaaggcacatagctttggagggggctttacctggaaaaggtgaccttgaaacttcatgtcaacttttggctcctaaaacagtaggtgggaagaaaggcagggccccttttctcactgaaaaaatggggaatattcccatagggattttctatgggcactcgggttcttggttttaaaataaaaattctgaagtgccacgacaaaaaaaaaaaaagggggggcctctttaaaagatcccttagggggccaaatttttccgcgggttggaaattt

SEQ ID NO: 36781 - DNA, 488 bp, Homo sapiens
  misc_feature (1)...(488): n = A,T,C or G
cgtgcaatgaaactgacggacntgcgnccggaaccccgggncgacccacgcgtccgattgccttcatcaatgtgtctgttttttaattcctcctttttcccttgaaaggacataataattttcaaactatgcaaatttctctttcataagaaagagtttttaagaaaattctagaatttaatatttcagtttccaagatttgagaattttacatctaattgttacttctaactcatttttaaagttcctaagtatccattttattatgaactcataaatgtaataaattgtgcaccttctaaaaaaaaaaaaaaaaaaaaaaaaaaaaaaaaaaannggggggggccctttttaaaatattcctgggggggccccatttttcggggggggggaagaaaaattttttttttttttggggggcctttttaaaaccctctggggggttttggggaaggacccttttctgtgggggggagaaaaatagcaat

SEQ ID NO: 36782 - DNA, 445 bp, Homo sapiens
  misc_feature (1)...(445): n = A,T,C or G
cggacgcgtgggctgccctatccaaaaagacaagacctatagctacctgaataaactaccagtgaaaagcgaatatccctctataaaactggtggtggagtggcaacttcaggatgacaaaaaccaaagtctcttctgctgggaaatcccagtacagatcgtttctcatctctaagtgcctcattgagttcggtgcatctggccaatgagtctgctgagactcttgacagcacctccagctctgctgcttcaacaacagtgacttgctctccaatggtatccagtgattcgttgaagaggaggtgctctgtagcagaaactgagctccgggtggctggttctcagtggttgtctcatgtctctttttctgtcttaggnggnttcattaaatgcagcacttggttagcagatgtttaattttttttttaacaacattaacttgtgg

SEQ ID NO: 36783 - DNA, 423 bp, Homo sapiens
ccttgctttttctttcactgataccactgaatggaactggtgctgtgactcctgctgctggggatttatgtcccgagaccttagcctggctgagtggagcctgagacctgcacaacagctcatggtcatgcatgagagagaagtggctggccacagccagagggaacagtaacagcccaggggcctttattttgggaaaggctgtccggggctgttactgtctcttctggttataaagcagacatgtggccatcttttccgcagggttagagtgggctcctttctttttggaatccttttcttctcctttggtagcagctccctgcctccagggcttccgccaccagcgtctctgctgtgttgcgcagtgcagtggggtgcaagggctttgtttctgcctgcctgaaagagagggctctgggg

SEQ ID NO: 36784 - DNA, 393 bp, Homo sapiens
cccatctctcccccgggcttgctggttttggggggtttaatgagagaggggactctggacgtgccagggtcagatgtcgccttcgaggaaggtgcagctgaacctggtgttttagaggataccttggtcccagagtcatcatgaaggcccttgatgagcctccctatttgacagtgggcactgatgtgagtgctaaatacagaggagccttttgtgaagccaagatcaagacagcaaaaagacttgtctaagtcaaggtgacatttagacatgattcttcaacagtggaagttcaggatgaccacataaagggcccactaaaggtaggagctattgtggaagtgaagaatcttgatggtgcctattatgaagctgttatcaataaacttacag

SEQ ID NO: 36785 - DNA, 422 bp, Homo sapiens
  misc_feature (1)...(422): n = A,T,C or G
ccaaggtgctcggtccttccgaggaagctaaggctgtgttggggtgaggccctcacttcatccggcgactagcaccgcgtccggcagcgccagccctacactcgcccgcgccatggcctctgtctccgagctcgcctgcatctactcggccctcattctgcacgacgatgaggtgacagtcacggaggataagatcaatgccctcattaaagcagccggtgtaaatgttgagcctttttggcctggcttgtttgcaaaggccctggccaacgtcaacattgggagcctcatctgcaatgtaggggccggtggacctgctccagcagctggtgctgcaccagcaggagggcctgccccctccactgctgctgctccagctgaggagaagaaagtggaagcaaagaaagaagactccgacgaan

SEQ ID NO: 36786 - DNA, 459 bp, Homo sapiens
  misc_feature (1)...(459): n = A,T,C or G
aatggtangcctgcggnaccatcgacggacattccgggncgacccacgcgtccggtagagaagaaaatatagtatttctgcgttggatagtaagatggcatcttcctggttgcaaagcttgcttctttttctgtagctgaaaagtgtggcttggtattacttttttttgtgacagagtctcgctctgtcgcccaggctggagtgcagtggagtgaacttggctcactgcaacctctgcctcccgggttcaagcatttcttccgccttggtctaccgagtagctgggattacaggcaggcgccaccatgcccggctaattttagtattttcagtagagatggggtttcaccatgttggccaggctgggtttgatctcctgacctcaagcgatccactgtcctcggcctcccaaagtgttgagattacaggtgtgagccaccatgctcgctgagagcaaaa

SEQ ID NO: 36787 - DNA, 404 bp, Homo sapiens
caaacatattcacccctgcagtcttgcacatctcagctaagggcaaccctgtacttcctggggctcagctgaacttcttgtcatgtttaaaatatgcaagatactatgttgtaagtgtgttactttgtaaaatgaagaaaaaattaagcatttacttaaaacaggtgaggaaatacatggtttcataaatttttttgacgtatgggagaaagaatgtttgaagacctctccctgcgtgatctgcaccctcaggacctctcagacgccatctccttcctgtgtcctcccagccccctctgctccagtcacacaggcccctttccttttcctggagccaaggttgctcctgcctcaaggcttccatgtgggctggccctctgcctagaactccctggcctctcagc

SEQ ID NO: 36788 - DNA, 408 bp, Homo sapiens
aagaccaggaagcaccactgcagaaaggggacgccaaaataaaagctcaagaggaagctgacaaacgcaagaaagaacacgagagaattatgttacaaaatttacaagaacggttagaaaggaaaaagagaatagaagaaattatgaagcggacaagaaagacagatgtgaatgcctcaaaggtcacagaaacatccagccatgacatatatgaagaggctgaggctgacaacgaagaaagcgacaaggactcattgaatgaaatgtttccatcagccattctaaatggcacaggctcacctaccaaatttaaaatgccgttcaacaatgccaagaaaatgacacacaagctggtatttctagaagatggtaccagccaggtccgtaaagagccaaaaacatatttta

SEQ ID NO: 36789 - DNA, 413 bp, Homo sapiens
ggcatccgggccctagaaattccacagctcccgtcctggccaccctggaagctcatcaggccaagacccggacagagcttcagaggagtgttgagtgacacctgaggatgcggctgcacacactcagccaagggccgagtctcacctgcggtggggtttcggctctgcctgggggctccatccctttcagccactcgtggccttggggatttctggttgtccccagctgggactgttcacagttgtcacctgcagacctgcctctccctggcctgaggttcaaaggcctcatcggatggtcagtacagtggggtcacctgttgtttctatacaacagcagggaaggggccatggagcttttccctgctgggtgctcctgctatggcccagcccacctttactggtgctccaag

SEQ ID NO: 36790 - DNA, 419 bp, Homo sapiens
acccttctgcctcctccttcttcatttatgaacccttgtgattacactgggcccacaccaataatccagggtaatgtctctatttgcatgtgaactggttagcaaccttaattccatctgcagttttaattcctctttgccagtgtaccaacatattcataggctcatgcattaagacgtggacctctttattccactggggaccaatactatgccttccacacctagcctctcttctgagttttccaagggccccccatcctcaggcatcctcaggcatagacagccggctgggccagaccacagtcaggatgtgcctgccactatcagagaggtcctttctacccaaggcccctcccacctgcctgctcctcttttagctcggacagtactggattcctcttccttcatcctctgat

SEQ ID NO: 36791 - DNA, 423 bp, Homo sapiens
  misc_feature (1)...(423): n = A,T,C or G
attcagagaacatccttatcccaaggatgttctctgaattcaagtcaaaagtcctgattaagaggctttgaaaatggagaagcccatgatctttccagcattggctctgatattgttaactgtgtaaccttgggcaagatagttagggacctcctacaactgtgattttatgaactaggcctgttaaatgtagtttccctacactactatttcttttttttttttttttttngggaaaggggagngncntttggncttnaggggggagggggggggggaaaattgggtttttttgaaaccttcccccccaggttttgggctttttccgggccccgccccccaatgtcttggaatatatatccccctcccccgggggggagaatattttttctatttttattgaaggcggtgggttgctaggtg

SEQ ID NO: 36792 - DNA, 467 bp, Homo sapiens
  misc_feature (1)...(467): n = A,T,C or G
ggggattgaagcctcgaaccgcccgaatccgggcacccaccgccgcagatacttgagcctgagagagaagatcagccttatcacatggcaaaaccccatctctgcataaaagtacaaaaattagccaaatgtggtggcacacacctgtaatcccagctacacaggaggctgagacaagaggatcatcgcttgagcctgggatgtggagattgcagtaagcccagattgcaccacagcacttcagcctgggtaacagagtgagaacatgtctcaaaagaaaaggacaaagaaaatgcagctttctgggcgcatgatacccacagactgtaatgtgattttagaaaaagcaggccgggcgcggtggctcacacctataatcccagcactttgngaggccgaggcaggtggatcacgaggtcaggagattgagaccatcctggctaacacggngaaaccccgtctctact

SEQ ID NO: 36793 - DNA, 421 bp, Homo sapiens
  misc_feature (1)...(421): n = A,T,C or G
ctgcagccaaccaaatccgcgccccacccctgacttcccatgtggagccgggtgtgccaggtatatgtcacaaggccatgccccgggacgggcagcatcacatggccttccctgacccaccctttggctctgtctgtcccagcccttctctagagagtacagtaccacttcaggtcaccagctgctctaagggcagaggctaccctctttcatggatgctaataacaaagaacaaacatctcagaagggaacataagaaccgcattatttggcttttctgatgttgggcagatcagtgaaggatgctgttgtgctccagtcactgacatttttcatataacattaccccaaaggacacagaaatgattccaaaaaatgtagaagtctttgcctagtaggtcactgcaaagagctaaaatcn

SEQ ID NO: 36794 - DNA, 414 bp, Homo sapiens
  misc_feature (1)...(414): n = A,T,C or G
acttaacttataaaagatatgaggcatatcacactacttgagctcaataacacgagatcatcaagtagagagttaatcatggtctttcatggaaaagaaaattaattaagaatttgttctattcacagctattgaatacaaaaaaactccaagcagatataagtttgagtatttcactttttaaaaattgattttttagtaaaaatctggacaataaatgttttcctatatcataaaaaatttcaaataaaccgagtaacaaacatgacattattttaaaatatgtagaagtaagaagcacatgaaaacgtttatatgagtgtgaagagaagaatcacatacaaattatttggggataccccaaataatttctctacagactattttcttgacatcgnatatcaagtgtattct

SEQ ID NO: 36795 - DNA, 494 bp, Homo sapiens
  misc_feature (1)...(494): n = A,T,C or G
gggccgcccccaattgaacgccttcgatgatggccgtgagaaccgcgtcgacccacgcgtccgcggacgcgtgggtcagatataagatttcagttctcattgagtctaagtgacagaaggaatggagaccctcttgggcctgcttatcctttggctgcagctgcaatgggtgagcaccaaacaggaggtgacgcagattcctgcagctctgagtgtcccagaaggagaaaacttggttctcaactgcagtttcactgatagcgctatttacaacctccagtggtttaggcaggaccctgggaaaggtctcacatctctgttgcttattcagncaagtcagagagagcaaacaagtggaagacttaatgcctcgctggataaatcatcaggacgtagtactttatacattgcagcttctcagcctggtgactcagccacctacctctgtgctgngagaggccangcaggaactgctctgatctttgggaagggan

SEQ ID NO: 36796 - DNA, 402 bp, Homo sapiens
  misc_feature (1)...(402): n = A,T,C or G
tgcagttggagatccagcaccctctatcgtaaatggacagatccagcaggatgcagttgagtttaacagcaccatcacatcagtcagctgggaataatttacatctgtagactgcttcatccaacgatagcagaatgcacattcctgccaagctcatgtggaacattcactaagatagaccacattctgggccacaaaacactttaacatacttgaagaatagaaaacatagaatgtctattctcagaccacaatgacatgaaactagaaatgaaaccagaaagatagctagaaaatcctaaagtacttggcaaataacacacttccaaataacacgagtcaaagaagatatctcaagataaattttagaatattttgaattaagtgaaaatgaaaataaan

SEQ ID NO: 36797 - DNA, 410 bp, Homo sapiens
tgctcctcattaagatttgtttaattcaaggtggtttggatttggtaagcctttgcactctgtagagtacttagaagacaagggcaacttacttggagttagagccaagctgtcagacggtgcccagcacacattaatgttagcttctttctgagaaaaaaatacctcttccaggccctgaaacaaaaaatacatttgctgtgaagattgaaaatgaacaaagttagaaaaaaaaaacagcaaaatcagtgatttagtcagatgagtttttcgttgtaggagcacttgatttctagtgtgttttgtacagtatataactacaagatagtacattttgtagcagttcaaagccaaagttgctagcatcattttgctgttgtgccagttaatcataggatcccattaaatag

SEQ ID NO: 36798 - DNA, 415 bp, Homo sapiens
aagattattccatgtactcaaaacctgaagattttgtagctgattttagattgatctttcaaaactgtgctgaattcaatgagcctgattcagaagtagccaatgctggtataaaacttgaaaattattttgaagaacttctaaagaacctctatccagaaaaaaggtttcccaaaccagaattcaggaatgaatcagaagataataaatttagtgatgattcagatgatgactttgtacagccccggaagaaacgcctcaaaagcattgaagaacgccagttgcttaaataatatgcagcaccactagcttgtgctggtttttagatttttttgttttcaaaaaaacatttgtcagtaatttaacatcactacaaaaagaagagtttgtgactattctcatctctgttttggaa

SEQ ID NO: 36799 - DNA, 434 bp, Homo sapiens
  misc_feature (1)...(434): n = A,T,C or G
tgcagaccagcacgatgggaaatgagacatgaagatgcaataatgtattatgcttttagtgaacttccgaagcttatatttgttagtgagatattggtatttcaattttattacgcaaatgttgaaaatatatcaaaatccagtatttgtaaagcatttaataatattttttgaagtttaattttcccttatttgcttcaaccaaccagatatctttcaatgagatttttcctcaagaatgaaatatctttttaagaaaattatatgagaattgctaaacaacttgattatctctattaaaaacaagttgaaaagtgtgaacattctatccctattacgagaagctttngaattgaattttaaaaattggtattgctctatgagatatntangtctcanatggtataattataacctncacttacttaaagaca

SEQ ID NO: 36800 - DNA, 468 bp, Homo sapiens
  misc_feature (1)...(468): n = A,T,C or G
attggacgcctgaggnaattgatngccttgccgggtcgacccacgcgtccgaaatgaacaaaagcaatttaaattctctggatgagcaagaaggggttaaaagtggaatgtatgttgtaatagaagttaaagttgcgactcaagaaggaaaagaaataacctgtcgaagttatctgatgacaaattacgaaagtgctcccccatccccacagtataaaaagattatttgcatgggtgcaaaagaaaatggtttgtcgctggagtatcaagagaagttaaaagcaatagaaccaaatgactatacaggaaagggctcagaagaaattgaagacatcatcaaaaagggggaaacacagactctttagaacataacagaatatatctaagggtattctatgtgctaatataaaatatttttaacacttgagaacagggatctgggggatctccacgtttgatccattttca

SEQ ID NO: 36801 - DNA, 410 bp, Homo sapiens
cggacgcgtgggcggacgcgtgggatgggtttgttatcctcactagaaagtaggctccacacaagcagagggttgcatctgattctatcactgctttattcccattcccaaaaaaaggttctcaaactggagcatacatcagcatcacctggagactcaataaatcccagatcactgggccccacccgtttcctgttaagtgggtctagggtggtcccaagaatttgtgtttctagtaagtttccatgcagtgctgctgctgctgctgctgctcgggtccacactcagaaccactcacccaaagcagtgcctgcccagctggtgtctgtcttagtctgttcgtgctgctgtaacaaaatccctgagactgggtaatttatgaagaacagaaatgtactttctcacaatcg

SEQ ID NO: 36802 - DNA, 413 bp, Homo sapiens
cggacgcgtgggcggacgcgtgggcggacgcgtgggcacaaaatgtattatggtgccatggctgttagtttttagtgagtgctgtaggattaattcgaaaataggcagaattccattcctcccaaggtggcaaaaattagctatactgatgtaattgtcatttacctgggtatgaattccctgacacacattcatgtcaacatatgtagcaaattttgtgaaaacacaacaatttgaagcttctgtaattttgagcactgctctaacaacaagcataatataaaattagttagattttgcaagtctacaaatgagctcttgcaacagaactcacagcctttttacttttttcccctaactttagcaatgtagtatcttgagccattaatttttgggtttttttaaaatccaga

SEQ ID NO: 36803 - DNA, 552 bp, Homo sapiens
  misc_feature (1)...(552): n = A,T,C or G
tttgtaacacgtcgactcatcgatttcatacgttaattatattcccttcttcaacttactcntcctatagtcggaanananaattgatcgcctgcagaaccgcctttgaattcccgtgcgacccacgcgcgcgactccagataaaacctagccttctaaatattgaccactttaacttaaaaaattctatagggattatattggagactcaactgcccttgggtttagtttataaaatggcctaatactgtggaattttaattttagaaagtcttagcatcagatcataaacattcattaaaagaactcacatcccatctgaaacttcccaggggagttgggattcttagtagattggtagaaaggggctcattttctactgcatttcccatttttggtatcttgttcagcatgttttatttttatttcttgtctgcagaacatcctatatttatgagaacattctttaagaagaccaccacatagaataccccttcctatcagctcgctctgatttaacaaaattaaggctaaatcctcagatgatgatag

SEQ ID NO: 36804 - DNA, 475 bp, Homo sapiens
  misc_feature (1)...(475): n = A,T,C or G
gtgagacgcccaatgaagcctcactgatagcatgaagaaccgcgncgaaccacgcgtgcggagctccaggggagaaactgttcctggtctcttccagcttctggtggccagctgcattccttggctcgtggctgcatcgctccagtcttcaaggtcagcatcttcaaatctctctctgctccatcttcacacggccttctcctcggtgtgtctaatatccctctgtctccctcttacagagatacctgcattggccagatgcagaggctcacacctgtaatcccagagctttgggaggctgaggtgggaggatcacttggggccaggaattgaagattatgctgggcaacatagtaagaccccgtctctacaaaataaacagaaaagaactgtatttatggcccacccatgtaatccaggataatctccttccatgtcaagacccttacttaatcacatctgcaaagacccttgt

SEQ ID NO: 36805 - DNA, 403 bp, Homo sapiens
cccacgcgtacgcaatggccaggaggcctatgcctctagctgcaacagcggcacctcttacaattccattagctctgttgtatcccggtgagggcagcctctggcttgggcagggtctgtttggactgcagaagcaagggggtgatgtagcccatccttccctttggagatgctgagggtgtttcttcctgcacccacagccagggggatgccactcctccctccggcttgacctgtttctctgccgctacctccctccccgtctcattccgttgtctgtggatggtcattgcagtttaagagcagaacagatcttttactttggccgcttggaaaagctagtgtacctcctctcagtgttttggactccatctctcatactccagtaccttgcttcttactg

SEQ ID NO: 36806 - DNA, 425 bp, Homo sapiens
  misc_feature (1)...(425): n = A,T,C or G
tgagttggatatttttaaagcagttaactaattttttcttacctaatcttttgggagttttgcttgttgatataacctttttagttaacctgaaagattccaaaaattgttcttaagtgcttgagactggaaccaaaattaaattgtacttcataaaatcctcttatagagttactcttgccctagattgtaaattaagtttggcattattgtcagactggatggagggtgaagtaaaatagtatgaacaattaagaggctctccccctcttgtctttaagccatattctcctacatgtattttataagaaaatgttaagtcaaattttagtggctctttaattcctgacctcttcattctccttttcagtataacctcccctatgctcatgcccacacagacaaaaaaaccaaacgaaataccn

SEQ ID NO: 36807 - DNA, 417 bp, Homo sapiens
cccacgcgtccgcagaaagtagaacgagagttacaactgaaaactcagcagcagctaaaaaagcagtatctagaggttaaagctcaaagaattcaacttcagcaacagcagcaacagtcttgccaacacctgggattactaactcctgttggagttggagagcagctttctgagggagactatgcacggttacagcaagtggatcctgttttacttaaagatgaaccccagcagactgctgctcagatgggttttgcgccaatccagcctctggcgatgcctcaagctttgcctctggcggcaggtcccttgcctccagggtccatcgcaaatcttacagaactgcaaggagtgatagttggacagccagtactgggccaagcacagttggcagggctggggcaaggaattctgacc

SEQ ID NO: 36808 - DNA, 427 bp, Homo sapiens
  misc_feature (1)...(427): n = A,T,C or G
aaaaagaggcaacttgagctggttgagagagtgtttggacaacagagtgggtgttaatggcttaaacaaagctggaagcactgccttatactgggcttgccacgggggccacaaagatatagtggaaatgctatttactcaaccaaatattgaactgaaccagcagaacaagttgggagatacagctttgcatgctgctgcctggaagggttatgcagatatcgtccagttgcttctggcaaaaggtgctagaacagacttaagaaacattgagaagaagctggccttcgacatggctaccaatgctgcctgtgcatctctcctgaaaaagaaacagggaacagatgcagttcgaacattaagcaatgccgaggactatctcgatgatgaagactcagattaattcctttctggagctttgagatcn

SEQ ID NO: 36809 - DNA, 178 bp, Homo sapiens
gcgatttactgggttctaataaattaaaaattaaacttgttaaaaaaaaaaaaaaaaaaaaagggggggccgttttaaagaatccctgggggggccaaagtttacccgggcatgcaacgtaaaagctttttccttatagggagccttattaaaacctacctgggaatttttggaaaaa

SEQ ID NO: 36810 - DNA, 427 bp, Homo sapiens
  misc_feature (1)...(427): n = A,T,C or G
aaaaagaggcaacttgagctggttgagagagtgtttggacaacagagtgggcgttaatggcttatacaaagctggaagcactgccttatactgggcttgccacgggggccacaaagatatagtggaaatgctatttactcaaccaaatattgaactgaaccagcagaacaagttgggagatacagctttgcatgctgctgcctggaagggttatgcagatatcgtccagttgcttctggcaaaaggtgctagaacagacttaagaaacattgagaagaagctggccttcgacatggctaccaatgctgcctgtgcatctctcctgaaaaagaaacagggaacagatgcagttcgaacattaagcaatgccgaggactatctcgatgatgaagactcagattaattcctttctggagctttgagatcn

SEQ ID NO: 36811 - DNA, 382 bp, Homo sapiens
cccacgcgtgcgtatatattgagactgcagcttttcacctctggttcctacatctggattgcagccataagaggacttatgtccgggctgtgctacgacagcaaaacgttccaggtgcatcaggtgctctgcatccccacctggatggcaaaatgcttttcttggacacttgaacccatcttctcttcttcataacccaccagcgaaaccagaatagggatgggagccacgctggacatccagagacagcagagaatggagctgctggaccggcagctgatgttctctcagtttgcacaagggaggcgacagagacagcagcagggaagaatgatcaattggaatcgtatttttcctcctttacgtcagcgacaaaacgtaa

SEQ ID NO: 36812 - DNA, 417 bp, Homo sapiens
ttgccctgatcaaagggggaacaagaagccattattttcctgtctttgaaactgtacctgggagcttctgtatacctgaacacatgcatggagcttcttggagggtggcacgtccagggaaggcatggaagcgccatgccccttccctatatcttgccctaggcatgtctttatcttttcagtggctacatgatttgagcctccaaactacgaaagagatttttttcacccaactatatggattaccacctaatgggataaagaaaacctaaagtcacagtcactgctgtgccccaggtggaagctgtaatctgcctggatcactgccaagtttaaagaacaacaagaacaaaaaccaagagtgaaggatttcatttagtttcagggatgacccacagcaaagtttgtaaacatgga

SEQ ID NO: 36813 - DNA, 477 bp, Homo sapiens
  misc_feature (1)...(477): n = A,T,C or G
agagcagnnnnnnnnnaactgatcgccngttgaccgcntcgaatntccggtcgacccacgcgtccgtttttttttgtgggtattcatttgatgtggatagctggggtgagtgctgctttccgtcttctgatgggggcctggaaaaggctgaactgcattttttaaggtctgtgacgcctgctgcaggacctgcagtgggggaaaattccccagggtggggctttctccctataagggtgctcagggctgaatatcaggacccagaaggctgaaagtgactgtccctcccttaacggatgtcttccttgtttctgtggccagggagatacttcaggggattaccggaagattctgctgaagatctgtggtggcaatgactgaacagtgactggtggctcacttctgcccacctgccggcaacaccagtgccaggaaaaggccaaaagaatgtctgtttctaacaaatccacaaatagn

SEQ ID NO: 36814 - DNA, 419 bp, Homo sapiens
  misc_feature (1)...(419): n = A,T,C or G
attacaggcaggtgccaccgccccacctgtgtttattgattgattgagacagggtctcattctgttgcccaggctggaaggctatggcatgatctcagctcactgctgcctcgacctcctgggttcaagtgatcctcccaccttagcttcccaagtagctgggactacgggtgcccaccaccacgcttggctaatttttttgcatttttgtagaggaggggatatgactgctgcctacgctatgcttagactcctgggctcaagcaatctgcccacctcagcctctcaaagtgcttggattacaggtgtgagccaccgcgcccagccaatcctagctatattacagtctttgactttaaagttaatatccccgtctgtgccatcttgatattggcatctgttgataccaaatgaagctn

SEQ ID NO: 36815 - DNA, 385 bp, Homo sapiens
  misc_feature (1)...(385): n = A,T,C or G
aatctctttctcctcaacccagcaagattgctagaccctgggttccctttcccttcactgcagtatgataattactttcaagcgcaaaggtttagaattaagatttcttactcctgggctaggtatggcttaccgtatttgtttctcttttcctagggatcataatcatgtattgcttgttgtccagttttccagtaggaggggaattccaggctgtacttacttcctgcagccaaaagaggaagtaatgttagtgatttcaatattaaaacattaaaaaaaaatttaagatggatgaaattcttttatatgcatattgaattgggcttcaccatagttatttttagaattaggactaaccggcagggaaaaaaactatacggcn

SEQ ID NO: 36816 - DNA, 400 bp, Homo sapiens
ccaagttatgcagccttaaacgacttgttctctatcgaacaaaagtagagcaaacagcactgctcagcattttgaacttctgttcagagcttcagcacctcagtttaggcagttgtgtcatgattgaagactatgatgtgatagctagcatgataggagccaagtgtaaaaaactccggaccctggatctgtggagatgtaagaatattactgagaatggaatagcagaactggcttctgggtgtccactactggaggagcttgaccttggctggtgcccaactctgcagagcagcaccgggtgcttcaccagactggcacaccagctcccaaacttgcaaaaactctttcttacagctaatagatctgtgtgtgacacagacattgatgaattggcatg

SEQ ID NO: 36817 - DNA, 254 bp, Homo sapiens
cgaaggcttgatgctgtctcagcagcctcagctgtgggggggaagcgcgtgtgcatcgtgtcaactactgtacatgttggtcatgtgaaaggaattatatatgtatagtattacaagtatttttgcatttttacaagattgaaatttgtagcattttgtattatttacacagaatttatttgtatatgaaactcataccataatttaattcgaataaatgaaacttttctatatattaaaaaaaaaaaaaaagg

SEQ ID NO: 36818 - DNA, 424 bp, Homo sapiens
  misc_feature (1)...(424): n = A,T,C or G
gcttacacactgggtgtgaaacaactaattgtcggtgttaacaaaatggattccactgagccaccctacagccagaagagatatgaggaaattgttaaggaagtcagcacttacattaagaaaattggctacaaccccgacacagtagcatttgtgccaatttctggttggaatggtgacaacatgctggagccaagtgctaacatgccttggttcaagggatggaaagtcacccgtaaggatggcaatgccagtggaaccacgctgcttgaggctctggactgcatcctaccaccaactcgtccaactgacaagcccttgcgcctgcctctccaggatgtctacaaaattggtggtattggtactgttcctgttggccgagtggagactggtgttctcaaacccggtatggtggtcacctttn

SEQ ID NO: 36819 - DNA, 494 bp, Homo sapiens
  misc_feature (1)...(494): n = A,T,C or G
ccgcgcccccattgaacgctntcggttcgagcaccgtaattcccgggccgacccacgcgtgcggaacatggcggagcgcggcaggaagcggccgtgcggttcgggtgaacactttcaaaggattgagtggcgaagatggaagcaacagaagaaagaggagaaaaaaaaatggaaggatctcaagctgatgaaaaaactggagcggcagcgggcacaggaggaacaggcaaagcgcctggaagaggaggaggcagcggcagagaaggaggaccgaggccggccctacacactgagcgtatccctgccgggctccatcctggacaatgctcaaacggcggatcttaacacctacttggccgatcagattggcagagcctgtgccatcttctgtgtggatgacatcgtggtgtttgatgaggagggccacgatgcctatactgtggagggggaattcacaggagttgggaagaaggggcaggcgtgcgtacagctgg

SEQ ID NO: 36820 - DNA, 408 bp, Homo sapiens
ataaatacttccctttttgtagatatttttctgtgcattgtaagttataggagcaggacatattttttgtacattgtcttgattgtttatactgcaggtaggtatttccagtgaatggaaacgttgaaatttatagatgggacaatgcacatacttcatatgtaaacaaagcatttttctaaataatttggaaaggattggatttagcaccgttaacttttaatacccatttattggctatttaaggtaaattataaaacctaaaattagtatcagtattttagatcctattattttttcaactttctattattttcacagtggaaaatttgcgtatagtattaaactattcttttttctgtctacctttatattttgaagtgtggttgtacttacgttaatagtaag

SEQ ID NO: 36821 - DNA, 416 bp, Homo sapiens
  misc_feature (1)...(416): n = A,T,C or G
cgaggagttcatgaatttcgacctcaagcagggcacctggggtggggactggcccgaggccctggctatcagtcagcggtggcagcagcaggacaaggcggccaacaaggagctcaccttcctgctattctcctgcccgcaccgcctgcgggagcacctggagaggggccgcggaaacctggagtggaaggagcccccctccatgcgcctgaaggcccgacccagcagccctggcttttccgtgcttacctgcagcgccttctccttctaccctccggagctgcaacttcggttcctgcggaatgggctggccgctggcaccggccagggtgacttcggccccaacagtgacggatccttccacgcctcgtcgtcactaacagtcaaaagtggcgatgagcaccactactgctgcn

SEQ ID NO: 36822 - DNA, 420 bp, Homo sapiens
cctcaaagttgtttctattcttagtaattatgcttaaaaaaaaatctttccttgctttgaaagccagttgctaaaaataaaaactgttccatgaaaaatcacaatgcccaatgataaaattatgtatttgttttttaaagggggaggatggcgagaaaaatagaaagctcctggctgacatcagaggtcacaagatgagttgctcatttgtccaaatgacattcagctgctaaaacaaatcagacttcttttacagggctgttgaaaagacagttagtcaggaggctttcaatacatgactgcaagggaatcagacacaggctagtcacttaattcgcttaattgtccgggtacccttagcccacgacttcagggctcagcagcttcatccttcatggcaccaaaccttgacgtaaggga

SEQ ID NO: 36823 - DNA, 416 bp, Homo sapiens
  misc_feature (1)...(416): n = A,T,C or G
cccacgcgtccgcccacgcgtccggtgaattctaagtgttaaactcaatgaattttcagcatgacgcccagccccactgctaccctgtcccagcatggcccttctccacactttatcatctatgccctcttatcagctaaaaattggagggtacgtgccaatgtatgtttgctttttgcttggtaagttatacacacaaccgttcccaggaaacaccgggaggtgggaagagcagttgattcgtggatcatcgaacttaacggggggtgggggtattggaccgtattccaagtagttgtcttgatcatttcaaaaagttttggccgacttgtggtcccacctgaatataggatctttttttttttttttttgagagggggcccccctcttcccccccagggannaaaagggggacc

SEQ ID NO: 36824 - DNA, 407 bp, Homo sapiens
  misc_feature (1)...(407): n = A,T,C or G
gctgcaacgccgagcggaggaggcaggaaccggagcgcgagcagtagctgggtgggcaccatggctgggatcaccaccatcgaggcggtgaagcgcaagatccaggttctgcagcagcaggcagatgatgcagaggagcgagctgagcgcctccagcgagaagttgagggagaaaggcgggcccgggaacaggctgaggctgaggtggcctccttgaaccgtaggatccagctggttgaagaagagctggaccgtgctcaggagcgcctggccactgccctgcaaaagctggaagaagctgaaaaagctgctgatgagagtgagagaggtatgaaggttattgaaaaccgggccttataagatgaagaanagatggaactccaggaaatccaactcanagaagctan

SEQ ID NO: 36825 - DNA, 405 bp, Homo sapiens
tggaaaagatcatgtgattttacagttgattttcatgccaaagttttgagtaacagataatatcagaaattattctcaaccttgtttcaggtttttgttttattttgtttacagagttaacttcaatgcccaaaagaactggaaataaatagattcagaagtcaaatgtattcactaactgtattcaagagtagatgaggccgggtgccgtggctcacgcctgtagtcctgacctcaggtgatccgcctgcctcagcttcccaaagtgctgggattacaggtgtgagccaccgtgcctggcctctgttttttcttttgttcttttaggggcggctttataacattaccttctttaacccaatctttatatctatcgtttaagactattaaatttatactgtgaat

SEQ ID NO: 36826 - DNA, 422 bp, Homo sapiens
tgtaagagctggctgagctccatgacgatggacagtgaagatggctaccagacgtgtgtgtctgaggactccagcaggggtgccttcagtcggcagacgagtacagatgatgagtgctttatccccaaggagggggatgattttctgaggaggtcatcttcaaggaggaaccggagcatcagtaacaccagcagcggatccatgtctcccttgtgggagggcaacttatcaagcatgtttgggaccctgccccggaagagcagaaagggaagtgtccgaaagcaactcttgaaatttatccctggccttcatcgtgctgtggaagaggaagacagtcgcttttgacggattgtggtgtcctttcaaattagcttatttcacaaatatctctagactcacccagatcccagcttggtgggaaa

SEQ ID NO: 36827 - DNA, 476 bp, Homo sapiens
  misc_feature (1)...(476): n = A,T,C or G
gagggggnnnnnnaactgatcccngtcgatcgcctcgaanncncggncgacccacgcgtccgcccacgcgtncgggcagatccacttccaggcatccctgccagcaggacctcagcgggtagaacactgctcctggcacagtcccctggaccgtttcttctcatctcccttgtggcacccatgctcctcactgcgacaacacatcctccccagccccgatggcccagctcccaggcacactggcctcagggaacccaggcttggccaggaagaagcctcagctcagccccggaacttctcacacaactctttgagaggagctcgtcctcaggacccctctgaggaaggtcccggtgattttggcttcctgcatgccagtagtagcatcgagtccgaggcaaaaccagcccagcctcagcccactggtgaaaaggaacaagataaatcaaaaactctttcccttgaggaggctgtga

SEQ ID NO: 36828 - DNA, 421 bp, Homo sapiens
cggacgcgtgggtaaaaatatcaagtacctgaggaactccctgattctataccctcttccttctttctgcaaggcagaggaataatatttttaaaggttattttgttttagttttaaatagcaaaacacaagctgcatttttatttattttgcataagaaaggtaaatctttttacaaaaaaaagtatagagttggaaactctgggaaaacttacggaaatacacaaatgcttctctgtaatgtgcaatatgctttgcaactgtagatgatattttatgtttaatctgtaaataagaaatgtatttaaattaaaagggatctttttgtaaaaggaccaaatgttcttttataaatgtaataaggaatatcttgctctttaaaatttattaggatttttatgagtaatttttatgaaaagat

SEQ ID NO: 36829 - DNA, 418 bp, Homo sapiens
aaagaaaatggaagagagcaagacgtggagatttataaaaaaggttgagggaaacatattcaaaagggaaaaagaaagcagggggaaaatacattagaggtgttgaaattagtaggcactcacagaggtgctaatcgagagttctgttgggctcctgtcatgctgctattaaagagcattagcagctaagagatctaaattctagtcctagttctttgtgttgccgtggagaagtcagttaacttacatgaggctcaggttccttacctgtgtgtaaaatgggaacattgaactaggtgatctttaagatcccttccggctctaaaattgtttgacattatcttggtggtcagtaactgtgagaaacacattcctgaggaaaatttgcagctatagttgacttcatgacagcatgttt

SEQ ID NO: 36830 - DNA, 400 bp, Homo sapiens
aaatatttaccattcatatatctgttaagtgtttttatctagaatatgtaatataaaaactcatacaactcaataaaaaatccaattaaaaaatagacaaagtatatgaataggcatttctccaaagaatgtatgcaaatggccaataatcacataaaaaagatgcacaatatcattagtttttaaagaaatggaagtcaaccacagtgagatactacttcacacccactaggatagctttaatcaaaaggacagaaacaagtattgtcaagggtgtggagaaattggcaccctcattcattgttgatgggactataaaatgatccataccatttagaaaacagtttggtagttccacaaattgccaaacataagagttaccacattatctagcaaagcg

SEQ ID NO: 36831 - DNA, 412 bp, Homo sapiens
  misc_feature (1)...(412): n = A,T,C or G
aagagggctacagggaaagggccctttctcaggggatgtttcttttttaaaagatttgggaacacttggaggatttgctaaaatgagcctcagaaggaaaattggttttctaacctgtgactttttgaaatgaattattcctttcagtctttatttttcaaagaaacaatgtgtattgaagtacctagatttgtttgataatcaacaaatctttcctttttcaatgaacatattctgaatgtggtttctgtcttagaccaggaggacagagtttgctttcatattttccctgtgagtaagagggcttatttattttaaataaagagtaattattantatatacaataagaaagaaaagacacccacttgagttaaaaaaaaaaagaagtaactgatttcctcttttttcttt

SEQ ID NO: 36832 - DNA, 420 bp, Homo sapiens
  misc_feature (1)...(420): n = A,T,C or G
cccacgcgtccgttagaattaaactcaagcagtcagtatagtatattttttaaccgactggttttagcttatcagaaagtaattattttatgtatttaaatacatttacaaagaaaatgaggcttttaaacagacctcactatttaacattgtacccagtagtggtgagcatgcttagtacccaaattttggtttctaaatgccattccccactaaaaggaaccagggttccttggagaaatggctgattccatgtttggagcacgggaagtgggtggtgtggctaaaatactttttattaagaaaataaaataaaaagcaagatagtatttgaagactaatggggtaatgtcagaagggaacaggcgccaagttgaaggtattctcactggccaaatttaggacaacttagaataatcn

SEQ ID NO: 36833 - DNA, 412 bp, Homo sapiens
aagcaaatgccctccaagaaggtcattctgtgcctgaaattaattcggataccgacaaatcagaaaccgaggaatccattgtaaccgaagagttaattgtagttacttcatatactctaggacaatgcagacagtctgaaaaagagaaaatggagcaaaaggccatttccaaacgatttaaatttgaggaacctttgctacaagaaattccaggagaatttatctactgagcaatatttccctttagaacttcaagatttctacattgaaaatgttaatattatttatggacctctggccaaatggtacatgtactggaagtggataaccagtatcacttacacaaacaaaaataactttgtcaaatttgtggagttaggtggaagccagattttaaaagttgccaaccagg

SEQ ID NO: 36834 - DNA, 448 bp, Homo sapiens
  misc_feature (1)...(448): n = A,T,C or G
tgaagatcggcgtcgttaaaacagttaaatgatatacctgttgaggagagagggatgtatcacttcaggtcccatgtgtctcaagcacctatgtgtctcatgttcgttatgaatcattattgtgccagagtcttaaaaagcagagccaagtcactgttcatctccagacccagcgcagagctgccgaagacagcaggatggtggcctccagggggtcggtgtgctgtgtccttcagaacgttattagtaattgtaaaggacatttccaagtgtgtgctgatggactgaactgacttttgtttacagcctatccagattatcaacagctccataaaaatggtgaagccggggaaatttcccagcggcaaaacagaaatcccttttgtatttcctctgcacttgaagggtaacaaagttctgtatgagacgtatcatggcgtcgctgtcn

SEQ ID NO: 36835 - DNA, 449 bp, Homo sapiens
caaattgtaaagtagatatttgtaatcttttaccactttggggttgcttttttcccggaattcatcagaactttgaattttttttttaaatgggctgtttttaatgcaggggcttttcttccctagaaacccaattctaagcagaaaaagaaaaaaaacacaaaaaataaaaaacccctacaaaaaaactttaaaaaaaatggcagcaaagggtagttttcatctggtgtcttttatttaagttttttaagttaagaaaagctggtgacatatttatacgtttttgtgcaaaaataaatgaatggcaatagattttaaaaaaaaaaaaaagggggggccgttttaaaggatccttgggggggcccaagtttacgcgggcatgcaacgtaatagttttttccttatagggagccgaattataagctacctggggatctttgagaaggaac

SEQ ID NO: 36836 - DNA, 453 bp, Homo sapiens
  misc_feature (1)...(453): n = A,T,C or G
cacaactgtgttcactagcaacctcaaacagacaccatggtgcacctgactcctgaggagaagtctgccgttactgccctgtggggcaaggtgaacgtggatgaagttggtggtgaggccctgggcaggctgctggtggtctacccttggacccagaggttctttgagtcctttggggatctgtccactcctgatgctgttatgggcaaccctaaggtgaaggctcatggcaagaaagtgctcggtgcctttagtgatggcctggctcacctggacaacctcaagggcacctttgccacactgagtgagctgcactgtgacaagctgcacgtggatcctgagaacttcaggctcctgggcaacgtgctggtctgtgtgctggcccatcactttggcaaagaattcaccccaccagtgcaggctgcctatcagaaagtggtggctggtgtggcn

SEQ ID NO: 36837 - DNA, 413 bp, Homo sapiens
  misc_feature (1)...(413): n = A,T,C or G
cggacgcgtgggacaaatttgagctacatagataataatactcacaaatgtgagaggaattatcaagatggaaaaatacattcagtataatctcatttacataaagttcaagaaaaatatttttaatatattgtaatttgttacattggtgataaaactctacagtgaaacatatgagtgatcatcataacaattgggataatcaggagggaggagataaacgggaaatatcagcaagaagacatatattgggagtgtctggattactggcaaattctattttctgaccaaggtgtggtaacatcgatgttaatgttataattttttctcttactgtttattaggttttattatgctccatatgtaagttatgctccccantnnnnaaaaaaaaaaagaagagagagagggga

SEQ ID NO: 36838 - DNA, 423 bp, Homo sapiens
cccacgcgtccgagctgtggctgggggtggatgccctgggtctcaacatctatgagcagaatgacagactaactcccaagataggcttcccctggagtgaaatcaggaacatctctttcaatgataagaaatttgtcatcaagcccattgacaaaaaagccccggacttcgtcttctatgctccccggctgcggattaacaagcggatcttggccttgtgcatggggaaccatgaactatacatgcgccgtcgcaagcctgataccattgaggtgcagcagatgaaggcacaggcccgggaggagaagcaccagaagcagatggagcgtgctatgctggaaaatgagaagaagaagcgtgaaatggcagagaaggagaaagagaagattgaacgggagaaggaggagctgatggagaggctga

SEQ ID NO: 36839 - DNA, 401 bp, Homo sapiens
agaaatgacgcgaaactcctgccttaaagccctaaatggcggcttcaatatcagccccactgagcatgaaattcatttacttaaataaaatctgaatctcagcccaaacctgggagattcaaaacctgagagcggtcttaccaaagacgcccgtatgtctggtgaagtcagttggatgcaagcagtttgtgctggtaccagggccccagctactgatgaagtggcaggagtccacagaagcctacttcgaagttcccggggcttccaggggagtctgatcccccaggaaagcagctggaaaacaagagcatgtgaaggaagcgcagcagctcctcgccagccagacagccagccccgcaccgcaggagtcgacatgcacggcagcctagacgccatcagtt

SEQ ID NO: 36840 - DNA, 385 bp, Homo sapiens
cgccacccctgcccgcccgacagcgccgccgcctgccccgccatgggtcgacagaaagagctggtgtcccgctgcggggagatgctccacatccgctaccggctgctccgacaggcgctggccgagtgcctggggaccctcatcctcgtgatgtttggctgtggctccgtggcccaggttgtgctcagccggggcacccacggtggtttcctcaccatcaacctggcctttggctttgctgtcactctgggcatcctcatcgctggccaggtctctggggcccacctgaaccctgccgtgacctttgccatgtgcttcctggctcgtgagccctggatcaagctgcccatctacaccctggcacagacgctgggagccttcttgg

SEQ ID NO: 36841 - DNA, 405 bp, Homo sapiens
cgcacgcgtgggcgcaggcgcaccgacagccgagttttttgcgcttccttatccctatcttcaaacgtcgtggacggtcggaactatgtcgcgccgggccctccggaggctgaggggggaacagcgcggccatgagcccctcaggcccggggccttgcattatgatctccgggacgacgatgacgcggaagatgaagggcccaagcgggagcttggtgtgcggtgtgccggaggcgcacggaaggagggcgttctattcaacaaccgcttcgagctgataaacattgacgagcttgtggatgaccctgtggtgaacggggagaggactggctgcgcgctcacagacgctgtgtgaccagggaacaaatgaaggggtcagcgggaaacacagaaagcaagacggat

SEQ ID NO: 36842 - DNA, 382 bp, Homo sapiens
gagaagcaggagctgtcgggaagatcagaagccagtcatggatgaccagcgcgaccttatctccaacaatgagcaactgcccatgctgggccggcgccctggggccccggagagcaagtgcagccgcggagccctgtacacaggtttttccatcctggtgactctgctcctcgctggccaggccaccaccgcctacttcctgtaccagcagcagggccggctggacaaactgacagtcacctcccagaacctgcagctggagaacctgcgcatgaagcttcccaagcctcccaagcctgtgagcaagatgcgcatggccaccccgctgctgatgcaggcgctgcccatgggagccctgccccaggggcccatgcagaatgcc

SEQ ID NO: 36843 - DNA, 545 bp, Homo sapiens
  misc_feature (1)...(545): n = A,T,C or G
tcccctcgccttccctctagaggaacatcggcctgtccgccagatgccgcgcccgcccccccccctttgcacatcntcgttagancgcntgcggaaccgcnccggaanncccgggncgacccacgcggccgannncaaaggannnnnactnnattatgaaccacaattattagacttatttaagatgtgcaggcatcagaaaaaagaagcacataatgcttttggtgcgatggcactcactgtgaacatgtgtaaccacatattaatatgcaatattgcttccaatactttctaatacagttttttataatgttgtgtgtggcgattgttcaggtcgaatctgttgtatccagtacagctttaggtcttcagctgcccttctggcgagtacatgcacaggattgtaaatgagaaatgcaggcatatttccagcctgcctctatgatgatgttaaatcattgctgtttagctgtgaacaagggatgtaccactggaggaatagaggatccttttggacacattttgaaaaggttcttctggaggga

SEQ ID NO: 36844 - DNA, 411 bp, Homo sapiens
  misc_feature (1)...(411): n = A,T,C or G
cttgacttcgctggtcggcatgtcttctcacaagactttcaggattaagcgattcctggccaataaacaaaagcgcaatcgtcccattccccagtggattcggatgaaaactggaaataaaatcaggtacaactccaaaaggagacattggagaagaaccaagctgggtctataaggaattgcacatgagatggcacacatatttatgctgtctgaaggtcacgatcatgttaccatatcaagctgataatgtcaccactatctggagatttcgacgtgttttcctctctgaatctgttatgaacacgttggttggctggattcagtaataaatatgtaaggcctttctttttaaaaaaaaaaaaaaaaaaaaaaaaggggcgcccttttaaaagacaccgtgggggaccn

SEQ ID NO: 36845 - DNA, 413 bp, Homo sapiens
cccacgcgtccgcccacgcgtccgcccttcgctcacctgcccaagaggtaaggatattggagggtggagggtgtgggaccaaagaaggcctgttctcacctctgtatgtcccccctcacacacagctagagccagaattttaggttgtccatataaagttaaaggtatattttagttgcaaataaagcagctttctggctgataatcaggaattgggcaaattttgattgtggagagcaagtttcaagtacagccagtactggggaagattgaactcctattccaacaaagacaggaacagattttgatatagtggtaagttggttttgagcaagctcatttgaccatttgagagctctgagaacaaatacagggagaggcgtggggaggaagaaagtgcacagagccttgcg

SEQ ID NO: 36846 - DNA, 395 bp, Homo sapiens
tgccatagtttggacagtacctttcaatgattaattttaatagcctgtgagtccaagtaaatgatcactttatttgctagggagggaagtcctagggtggtttcagtttctcccagacatacctaaatttttacatcaatccttttaaagaaaatctgtatttcaaagaatctttctctgcagtaaatctcgcaggggaatttgcactattacacttgaaagttgttattgttaaccttttcggcagcttttaataggaaagttaaacgttttaaacatggtagtactggaaattttacaagacttttacctagcacttaaatatgtataaatgtacataaagacaaactagtaagcatttccccaggtcatgcttactagtttgtttttggcct

SEQ ID NO: 36847 - DNA, 479 bp, Homo sapiens
  misc_feature (1)...(479): n = A,T,C or G
gggcccggnnnngnaactgancccctgagtatctcgccggaangcncgggaagacccacgcgtccggntcatccaccgcatgaagctggagagggcatctacttcctccctggaggatcgggtgaagcggaatatctactctttacagagaacttcggtagctctggagaagaactttatgaaaagatgaaaactgtcccctctcttattggttttcctgcattttccagggaagctgctgaccccttaattctctttataagagttcaaatgacttctttcacagatgtcaaaccaccagtgttcaaagtgaccctgcttcattgagtcctgaaacagctcacttcctttgagagctagtgtgacttgctttgtgggacactcagtaactttgggttttgactctttaacgggtgggcactggaccatctcggtgggagtgcttgtgccactctggaaggctgttccctggggttgtg

SEQ ID NO: 36848 - DNA, 409 bp, Homo sapiens
  misc_feature (1)...(409): n = A,T,C or G
cccacgcgtccgatgcagtgtttcatgtaacacggatgatgaggaaccactgaagattcaccagcagggaactggctacacgtaccgtggttctagagacaatgcgacgacaattaaagagaatgagaagggcagagttaggggatctgtaagtgcagaaatctgtaaggcagagttagaaagaaagctgccaaataatttgtatggtatgacctcatttatgttaaaaaacaaaattctaactatagtaggtctacatatgtatataaatgtaaataaaaacattgaaagaacacacatcaacattaagtgttgaatgaagaggaaacctactacaatgatgtaaaacaaaaaaaggtggtaggagagttcatataaactcagttactaatgtatcaatattggnttt

SEQ ID NO: 36849 - DNA, 412 bp, Homo sapiens
cggacgcgtgggcttagtagctcatatcatttccacgttattcactaaagaagaaattggcaagaggaaacctgtaaaggaaactacaattttatgttgttgatagtgaaatggaatggttttgaagtactgacccttaagaaatagccctatgcactgattagtaaggaggataatttaggagagggaagcaaacttttttttttaatgtctagagttaacatagtctagaattggcacccctagcattttaaattgatacaaagcattgaaattttgatatctttaagatgttactgttatcacatgacttttgagaatcccaaaaccctaaaaataagtctcgataagaaataataaaacagaaatattttagaaatagttcttaagcctttctgattacatgcaccat

SEQ ID NO: 36850 - DNA, 409 bp, Homo sapiens
  misc_feature (1)...(409): n = A,T,C or G
ccagtgtgtcaggcaatctggactttccagtgatgccactgagatggcacctgtcaaaagagcagtggttccatttctagattgtggatcttcagataaattctgccattttcatttcacttcctgaaagtcagggtcggcttgtgaaaagttgttaaacaacatgctaaatgtgaaatgtcaaccctcactctaaactttccctgttcagagcatcagatgaagacttcattgggttttatagtggctttctgatttttggtagtccattgaagaagggagtttgaaagttgttgtatactgttaacgattgtctgcccatgtcctgcctgaaataccatgattgtttatggaaagtatctttaataaagctggatacagttaaaaaaaaaaaaaaaaaaaaaaaaan

SEQ ID NO: 36851 - DNA, 402 bp, Homo sapiens
  misc_feature (1)...(402): n = A,T,C or G
cccacgcgtncgaagaggaacaatcttgggggtagtactaagttttgtcaatattgtggtttcctgattgtattgttggctttctctctgagcattgaggtatactagaagtagagcttctcaaacataatatcattacctcataagcattaacaaatcaggcccaaagagcgtaagtcctagaaatttgttttaaagcagccctagtcatggtgctggtgctaccgccttgttttaggagcctgcctcctgtcagtatgaaaccctcacctgaaaaatgccagcctggacaccaaacactgagccccttcaacaggcacattatttccccctgagatccataagggaatttagtttctactattgtagagttctgaaaagaggtaaaatagtagtcctttg

SEQ ID NO: 36852 - DNA, 403 bp, Homo sapiens
  misc_feature (1)...(403): n = A,T,C or G
cccacgcgtncgcggacgcgtgggttcaatttcctattttggatttagttttgtcaatggtagtgacttactgaacatgggcaccaactaattttgttgttgttctaccagaaaacctcagcagatgttttgatttgctgctttagttgtaataattcaatttttataggtagttgtaagaacttagtcttatttgacttttttattttatgttaatgttttcagttctcactttgaggcacatttacatcaatgcttttgttcctctcacatgctgaaagcaagatgtgttccttattgtgaagagcgacacaactgcctgctgcctttccacagctataatggacatcaggttgactctaaatcaaggatcatgtgtgcacaatacttgtggcccacaaaa

SEQ ID NO: 36853 - DNA, 399 bp, Homo sapiens
tgcgcgggggctgtggctccgggactgcggagaacatattgtgatgttcgtgcctcagagctaaaactatgagtgaatttcggattcaccatgacgtcaatgaactgcttagcctgctgcgtgtccacggaggagatggggctgaggtctacattgacctgcttcaaaagaacaggaccccgtacgtcactaccactgtctctgctcacagtgccaaggttaaaattgcagagttttctcgtactccagaagactttctaaagaaatatgatgaactgaaatctaaaaatacaaggaaccttgacccgctggtgtacctgttgtcaaagctcacggaagacaaagagactctgcagtacttacaacagaatgcaaaagaaagagctgagcttgcagccg

SEQ ID NO: 36854 - DNA, 399 bp, Homo sapiens
  misc_feature (1)...(399): n = A,T,C or G
attagatctttccctgtgaatacgtgtactctgtctggttttcttaacttctatacaatattccatgatatggatgtaccatactttaattcaatcctctactgataaacttgaggattgcttctaggtttctccctattaaaaacaatcttggaaaaaaattcttatccatatctagaggagatatttagaagtagaatggatggcttgaggagcttttcagtattaatagatactaccatattgccctcccaaaatgttacactttatactttcaccagtagtgtattaaaatactagtttctctgtaccctagtccagtggtccctaacctttttggcaccagggaccagttttgtggaagacaatttttccacagatctggctggggagatggtn

SEQ ID NO: 36855 - DNA, 469 bp, Homo sapiens
gctggagtgcagtggcgcggtctcggctcactgcagcctccgcctcccaggttaagcgattctcctgcctcggcttcctgactggctgggattgcaggcgcccaccaccatgcccggctaatttttgtgttttcggtagagatggggtttcaccatgttggccatgctggtctctaactcctaacctcaagtgatctgcccacatcggcctccaaaagttctgggattatagtgtgagccactgcgcccggccatggctccttaatcttgatccaaattattgttacatccagaatgtgatgaatcaaaatctcgagatgggggtccagcaatctgaaatttcagtatgccagggcttttctgtatgtcaaagtgggtttgaaatagataatttttcttctagtctgaaatgtatcgcgaaaatttggaaatcctgaacgctggaagatgaaataagtctttctaggat

SEQ ID NO: 36856 - DNA, 417 bp, Homo sapiens
cccacgcgtccgcggacgcgtgggcaaatactgctagaagcattgtcaaataagaaatggtgttttacctttctttaagctgtgtttgtgtaagttcatcatttatagaaatgtgaaattttatgagattcctaagatactgacatgctgagatacctgtaataattgcaatttttatgttggatgattgtatgccacagaagcacttaaatttcctggttaattggtaacgttaatcagatctttacctatggctgttctgggtttttgtcattcacagatattattttaatttcttctttggaagcgttcgcaatcagctatagtccaaaattgctaattaagatcaagcaaaacaaaattaattacgtaggattaatttataaggatgtttttatgacgtgaatgttgtatttt

SEQ ID NO: 36857 - DNA, 413 bp, Homo sapiens
cccggtgtcgacttactagctgcaagcctctgcctgccttcctgcgcgccgttccccgctagtcgctgctgctggcgcgcactcgccgggtttttcctcccacggcctcgagatggtggtgaatgtggcacggaggagccgggccttccaacccggtgggcccgagctccgaaaggccccctcggcagtgagaggggcgggagcccgcgggggccgcgcccttctctcgcttcggactgcgcaacgctgcgctctgggctgacaggcggataaaacggtcccatcaagactgagaaaaagcacaccagctattggcacagcgtgggcagtggggcctacaggatgactgacttagtctacagagatcccggcgtacttaagcaggtagtaatgatggacagatgaagactctt

SEQ ID NO: 36858 - DNA, 424 bp, Homo sapiens
cccacgcgtccgcccacgcgtccggtgtttggaaaaattacagcctgcctatcaagtgacccttcccggacaagagcccattgtgaagaaagggagaatctgtccaattgacatcaccctagcacaaagagcgtctaataaaaaggtgaccgtggtccggaacttggaggcctatggtctggacccatactcagtggctgccatccttcagcagcgatgccaggctagcaccaccgtcaatcctgcccctggggccaaggacagccttcaggtgcagatccagggaaaccaggtccaccacctcggctggctattgcttgaagagtatcagctccctcgaaaacacatccaaggtctagaaaaggccctcaaacctggcaagaagaagtgacagactcttttgtctcacgtggtggatccggtg

SEQ ID NO: 36859 - DNA, 398 bp, Homo sapiens
ctgtgctgcccctttcacatcaaagaactactgacaacgaaggccgcgcctgcctttcccatctgtctatctatctggctggcagggaaggaaagaacttgcatgttggtgaaggaagaagtggggtggaagaagtggggtgggacgacagtgaaatctatagtaaaaccaagctggcccaaggtgtcctgcaggctgtaatgcagtttaatcagagtgccatttttttttttgttcaaatgattttaattattggaatgcccaatttttttaatatgcaaataaaaggtttaaaaacttaaaaaaaaaaaaaaaaaaggggcggcccttttaaaggatccctgggggggcccaagttaacccggggatgcaagtttttatttttttccctatagggg

SEQ ID NO: 36860 - DNA, 426 bp, Homo sapiens
gcgaaatgagactgttcgtgagtgatggcgacccgggttgcttgcctgtgctggccgccgccgggagagcccggggcagagcagaggtgctcatcagcactgtaggcccggaagattgtgtggtcccgtttctgacccggcctagggaacctgttttgcagatggatagcggcgactacctcttcttcactagtgcaatctgccgatatttttttttgttatctggctgggagcaagatgacctcactaaccattggctggaatgggaagcgacagagctgcacccagctttggctgctgccctgtactatttagagggccacggcaagaagggggaggatgaactatggtcagagcggagagccctgactcacattgaccacagctggagtcgtcagaactgtcctttcctggctggggagacaa

SEQ ID NO: 36861 - DNA, 408 bp, Homo sapiens
cggacgcgtgggcggacgcgtggggtgctgaaaaaggttggttgatagcagcttggagtgctaactggaagatcaaaatcatgtctcttgctgataacctaagagcattaagctctgagtccagtgaggtcatagcagtgtatgctccttgcccttacggagtgtctgtttttagaaatttagattttaaaaggcgtgggacatacgaccaggccctatagccacataaatataaatttcatagaaaaagaataaaagcggagatatattttttgacacagaggcacccaaagaaatacaaacattgcctagctgctgccatttctgtaactgcccagaagggtgacagatttctgaaggggaaaggattcagatatgaccttttctttagtcccaaccactagtttt

SEQ ID NO: 36862 - DNA, 405 bp, Homo sapiens
cctgtgtggtagattggacatcacagtacaccatggtctttcacccagccagggagaaggttcttcgctcagtatgaagaaaagcaacccaaaactctcaatctgatttgtttttgtttatgtcgatgccctgtagtttgaaagtgaagtaaagatttagaattcacctaagtccaaaggaaaacacgtggtttttaaagccattaggtaaaaaaagttctcaataaaggcattacaattttttaggtttagaaagatggacttttctgataaatcttggcagacatctaaaaaaaaaaccatatttttcacaagaaaatgcaagttactttttttggaaataatactcactgattatggataaaatggaatattttcagatactatattggctgtttcaaaatg

SEQ ID NO: 36863 - DNA, 434 bp, Homo sapiens
aacgtgctggtctgtgcgctggcccatcactttggcaaagaattcaccccaccagtgcaggctgcctatcagaaagtggtggctggtgtggctaatgccctggcccacaagtatcactaagctcgctttcttgctgtccaatttctattaaaggttcctttgttccctaagtccaactactaaactgggggatattatgaagggccttgagcatctggattctgcctaataaaaaacatttattttcattgcaaaaaaaaaaaaaagggggggcctcttaaggggacccttgggggggccgaatattacgggcgttggacaaaaaaaaattctttccttaaggggggcttattcatcgcctaccgggggtttttggtaaagaaccttctcttttggtggggcgctaagtggacccgcccccttccgcttttttg

SEQ ID NO: 36864 - DNA, 415 bp, Homo sapiens
aattacactggatcctgtgacagacactttacccttcatgggtcacatggtctgtttctgctcctctctgccctggctggtgtgggttgtagtgacagagaactctccggtgggagatctggggctgggacattgtgttggaagacagatttgcttccataaattttaagtgtatatattttcctctttttcccaggacactctggacttcagccaagaggtaataccttttaatcctcttttagaaacagatacggtttccctagtgagaggtgaagccagctggacttctgggtcgggtagggacttgcagaactttcctgtcttaggagaggtttctaaatgcaccaatcagtgctctgtaaaaacacaccaattggcactctgtggctagatagatgtttgtaaaatggac

SEQ ID NO: 36865 - DNA, 414 bp, Homo sapiens
  misc_feature (1)...(414): n = A,T,C or G
agggtcctgtacacaaccacccactagttctcttctccagccaagaggaataaagttttgcttccattcngaagaaaaaaaagaaaaaaaaaaaaaagggggggggcgggtaaaaaggacccaagggggggcaagattcacgggggcggggggggcagaccacccccccctaaaagggggcctttaaaaaccaaacgggggtatttggggaaaaaacctttttttggggggggaaaaaaagggggaacaccccccccgaaaaataaaccgctagggggaaaaaaaaatttttagaggggaaaggggggaaaactcacctcatattcttctgttaaaaaaagtccnncncccnnngaaanccatcaatcccggcagtatggctctgaagggacccactcccctctttacatggtt

SEQ ID NO: 36866 - DNA, 415 bp, Homo sapiens
  misc_feature (1)...(415): n = A,T,C or G
ctggtaggccttggagaggcgggttaggaagagtggagactgctgcacggactctggaaccatgaacatatttgatcgaaagatcaactttgatgcgcttttaaaattttctcatataaccccgtcaacgcagcagcacctgaagaaggtctatgcaagttttgccctttgtatgtttgtggcggctgcaggggcctatgtccatatggtcactcatttcattcaggctggcctgctgtctgccttgggctccctgatattgatgatttggctgatggcaacacctcatagccatgaaactgaacagaaaagactgggacttcttgctggatttgcattccttacaggagttggcctgggccctgccctggagttttgtattgctgtcaaccccagcatccttcccactgctttn

SEQ ID NO: 36867 - DNA, 406 bp, Homo sapiens
  misc_feature (1)...(406): n = A,T,C or G
caatatttcaatatgttgagtgtgtgtccaatgctatgaaattaaaatattaaataacatatttatggcattttcttgaagagtgtggttgaagaaatatttctccttttgtttttctttttttttgcttgttactgccacttctttttaggagcaaatctccccaggggtgtacggtatttcttgactctgggaacagctgctacccccaagacttgccacgttgttctgccctcagatggaattaggtgaatgtgtgtagctgctttttcactcgtggacctctccccatcccttgctctgaccccagagctctgtgtatttgcatccagaggccatggaaacattctttgcatttaagagacagatttattccctgtggagagtgggtggattcattgccacn

SEQ ID NO: 36868 - DNA, 412 bp, Homo sapiens
attttgactgcactgggttctgggtcaaggacaagtacaagctgcagcagaccttcagtgtgaatcgcatctacctcaggcatgccaactcaggcgtggccaccgacttcatgcactggcagatccccctgagccgacggtttcgctctgttaaactctggttcgagattcggtccttcggggtgaagaatcttcaagcacatgacagacatggtactgaaatggctaaatattttgaatctctggtcagaaacgacccttcctttgaaattcctgccaagaggcaccttggcctggtggtttttcagctaaagggtgctaattggctcacagaaaatgtgttaaaggacatagcttaagctggccgtctctgtctcattccggccactatgcaagacaagttaatcatccc

SEQ ID NO: 36869 - DNA, 402 bp, Homo sapiens
  misc_feature (1)...(402): n = A,T,C or G
taattttcatgtcatataacacgaatggggctcccaggtaggaagggagttttggttgagttaagtgacttacgtaatacaagtaattgtgcttgtattacttcctgagccttctcagtcccctagcaatcttgggcagtcatacagcttggagaactgatgacttggagaatttgttcccagcctgttcattcctggtaatgagtaatccctctcaaatcccaaaggacagggagcaggctgtaattctgaagagtggatattcttgatgccacagcagtttccataccagccttcaccaaaaggaaatatgccagacagggaatgccgaagagtaaactttctacaagtgatagtatctacgatccattgtgtcatgaatcaagtttataaactagattn

SEQ ID NO: 36870 - DNA, 441 bp, Homo sapiens
gcgcttccctgagcacaaaagattctttaaggagtaattctccagtggaaatggaaaccagcactgaacccatggaccctctgactcccagtgcggctgccctggcagtgcagccagaagcggcaggcagtgtggccatggaagccagctctgacggagaggaggatgcagaaagtacagacaaggtaactgagacagtgatgaatggcggcatgaaggaaacgctcagcctcactgtagatgccaagacagagactgcggtcttcaaaagtgaggaagggaaactgtctacctctcaagatgctgcttgtaaagacgcagaggagtgtcccgagactgcagaggcgaagtgcgcggcgcccaggcctcccagcagcagtcccgagcagaggactggccaaccaagcgcaccaggtgacacttcagtgaatggccctgtat

SEQ ID NO: 36871 - DNA, 402 bp, Homo sapiens
aacaaggggtagagagtttggtgtaactactggaatgaaaagaagatgtggctggttggacctcgttttgctcaaatatgctcatatgatcaatggatttactgcgttggcacttaccaagttggatattttggacatgtttacggaaatcaaagttggagttgcttacaagttagatggtgaaatcatacctcatatcccagcaaaccaagaagtcttaaataaagttgaagttcaatataagactctcccaggatggaacacagacatatcaaatgcaagggcgtttaaagaactacctgttaatgcacaaaactatgttcgatttattgaagatgagcttcaaattccagttaagtggattggtgttggtaaatccagagaatctatgattcaactctt

SEQ ID NO: 36872 - DNA, 459 bp, Homo sapiens
  misc_feature (1)...(459): n = A,T,C or G
aatcgtangcttcgnggntcctgccggaanccccgggncgacccacgcgtncgggggaatgaccacatttgtgtgctgaaataacatttagtactagagataaaactggaataagtgatctaaactttgaaatgttttgaatgacctttggctacaaagtcaaattataatgctttctatttcttaagataactctttatggaagttctagtatgtacctaactttggcaccttagatttgccccacactgaatcttatctattaaacctatctcattctggggtgagaacccagatgtgtaaaatcgtatggccagaggtgactgagaagtgcattttgactatgtttcatagtcttttatccatcttagcataatctttttaccagcaccactggagttgtgaactcgctcaatttcttgtgatgtccagggtaaaaatgtatgcctataaatgtaa

SEQ ID NO: 36873 - DNA, 379 bp, Homo sapiens
acccagagagtgacttttatcgagggaaatgtgaacctgtgactgaactcagctggcactcctgtcggcagctcctctaccaggcagtggccacaatcctggcccacgcgggctttgactgtgctaatgagagtgtcctggagaccctaactgatgtggcacatgagtattgccttaagtttaccaagttgctgcgttttgctgtggaccgggaggcccggctgggacagactccttttcctgatgtgatggagcaggtattccatgaagtgggtattggcagtgtgctctccctccagaagttctggcagcaccgcatcaaggactatcacagttacatgctacagattagtaagcaactctctgaagaatatgaaag

SEQ ID NO: 36874 - DNA, 393 bp, Homo sapiens
aaaaaaatgacactccaatgggctgcagtggcaacctttctttatgccgaaataggactcattttaatgttctgcctaccttttattcctcctcagagatggcagaagattttttcatttaatgtctggggtaaaattgcaactttttggaacaaggctttccttaccattatcatcctattgattgttctatttctagatgctgtgagagaagtaaggaaatattcctcagttcataccattgagaagagctccaccagcagacctgatgcctatgaacacacacagatgaaactttttaggtctcaaagaaatctttacatttctggattttccctatttttttggctagttttgagacgtctggttacgcttattactcaactggcaaaa

SEQ ID NO: 36875 - DNA, 401 bp, Homo sapiens
tatgtatacatatacatatataaaatatatatattaaaataaaattatcaggaatactgcctcagttattgaacttttttttttaagaatactttttttttaaactgagaagtatagggatgaaaaagatgttatattgcgttcgactattttccaacttgtattttcatataattaatattttttaaaagctgaaaatttaaaagcaggatgaaaaaacggaaaagcaggtgctttttaaaaatcagaactgaggtagcttagaaatgtagcgatgtacgtgtctatgtttttttaaaaaaaaatgcaaaaaattcttatggcggagttttttgttggtttattatagtagctgaggctgccacatcattttgctggagagttttttatatactgctgct

SEQ ID NO: 36876 - DNA, 473 bp, Homo sapiens
  misc_feature (1)...(473): n = A,T,C or G
gggagttttnaatgaggcatcgatgagcncgtaagaaacggctcgacccacgcgtgcgagttgctacaggaacaggacctaataaaaagatagccaaaaaaaatgctgcagaagcaatgctgttacaacttggttataaagcatccactaatcttcaggatcaacttgagaagacaggggaaaacaaaggatggagtggtccaaagcctgggtttcctgaaccaacaaataatactccaaaaggaattcttcatttgtctcctgatgtttatcaagagatggaagccagccgccacaaagtaatctctggcactactctaggctatttgtcacccaaagatatgaaccaaccttcaagctctttcttcagtatatctcccacatcgaatagttcagctacaattgccagggaactccttatgaatggaacatcttctacagctgaagccataggtttaaaaggaagttctcct

SEQ ID NO: 36877 - DNA, 401 bp, Homo sapiens
  misc_feature (1)...(401): n = A,T,C or G
acaaatagtactgcagctaaaccagcggcttcaataacaagtaagcctgctacacttacaacaactagtgcaaccagtaagttgatccatccagatgaggatatatccctggaagagagaagggcacagttacctaagtatcaacgtaatcttcctcggccaggacaggcccccatcggtaatccaccagttggaccaattggaggtatgatgccaccacagccaggcatcccacagcaacaaggaatgagacccccaatgccacctcatggtcagtatggtggtcatcatcaaggcatgccaggataccttcctggtgctatgcccccgtatgggcagggaccgccaatggtgcccccttaccagggtgggcctcctcgacctccgatgggaatgagacn

SEQ ID NO: 36878 - DNA, 405 bp, Homo sapiens
  misc_feature (1)...(405): n = A,T,C or G
cacaactgtgttcactagcaacctcaaacagacaccatggtgctcctgactcctgaggagaagtctgccgttactgccctgtggggcaaggtgaacgtggatgaagttggtggtgaggccctgggcaggctgctggtggtctacccttggacccagaggttctttgagtcctttggggatctgtccactcctgatgctgttatgggcaaccctaaggtgaaggctcatggcaagaaagtgctcggtgcctttagtgatggcctggctcacctggacaacctcaagggcacctttgccacactgagtgagctgcactgtgacaagctgcacgtggatcctgagaacttcaggctcctgggcaacgtgctggtctgtgtgctggcccatcactttggcaaagaattn

SEQ ID NO: 36879 - DNA, 422 bp, Homo sapiens
cccacgcgtccgcttccaaagaagtcatgttaaaatttgatgaacacactgaataatttgcatcagcagtgggcaaaattgcagcagagaccgagagatgatggactcatggatttagcaataaatgactatgattttaattctggaaagaggttgcacatgatagatttggaaatccaagaggcatttttgtttttcatggcctctattttaaaaggttacagatcatacttaaggccaataacacaagccccatctgagacagccacagatgcagcctctctctttgccctacaagctttcttaagaagccgggaccggtcacatcaaaaattctataacatgatgaccaaaacacaaatgtttattcgcttcattgaagaatgttcttttgttagtgacaaagatgcaagccctggctt

SEQ ID NO: 36880 - DNA, 436 bp, Homo sapiens
cggacgcgtgggctttgcgttcgggctgggagcgtgctttccacgacggagacacgcttccctggattggcagccagactgccttgcgggtcactgccatggaggagccgcagtcagatcctagcgtcgagccccctctgagtcaggaaacattttcagacctatggaaactacttcctgaaaacaacgttctgtcccccttgccgtcccaagcaatggatgatttgatgctgtccccggacgatattgaacaatggttcactgaagacccaggtccagatgaagctcccagaatgccagaggctgctccccgcgtgccccctgcaccagcagctcctacaccggcggcccctgcaccagccccctcctggcccctgtcatcttctgtcccttcccagaaaacctaccagggcagctacgggttccgtctgggctt

SEQ ID NO: 36881 - DNA, 483 bp, Homo sapiens
  misc_feature (1)...(483): n = A,T,C or G
gcgggctagcccaatggaagcccctgcggaatgagagccttcccgggnccacccacgcgtccgactgataccaagatacaagaatcatcttcacaaagtttcgttgcttctgagaaccaagtacgtgcagcagaaagtaaaataatggaaaaacgtcctgaagaatacagtgaagattcataaatggattcatttttggacatgcagctaactgaagacctggattccttaatacagaatgcttttgagaaattgaactcttctcctgatgaccaagtatactcatttttgccttcacaagatgttaatagatgtaacgactcaagtgagtttataaatcctgattcaagtaatatgactcccattttttctacacaaaatatgaatttgaacggcgaaaaattacagaattctggttctactttaagtttaaacccattaccttcacattcagttntgaacgagtccaagtgttttataaag

SEQ ID NO: 36882 - DNA, 415 bp, Homo sapiens
tcgagaccagcctaggcaacatggattgacccccgtctctactaataataccaaaaaaaaaaaaaaaacccggccttggggggggggcccttgggcccccgcttcttaggggggttggggccttaaaatcctttaaaggttggggggggggaggttccattaacctaaaatcacggcccttgctctccatttgggcccacaaactgaaaccttgtttaaaaaaaaaaagggccgggggaaaaaaatcttccttggccccccaaaggggtgaaaataacggccttggccctttggccccggttttttttgtttttttaagggaacctttcccaagcccaggagcaatggccctcccagccattaaaaaaattgtgggactttgaccagcccatttccctttggggggcctactttg

SEQ ID NO: 36883 - DNA, 401 bp, Homo sapiens
cccacgcgtccgacaggcatgagccaccatgcccagccatgaatttttttttaagacccaacagtgtgctgcctacaagagtcacctcacttttaaggacacccatagactgaaagtgaaaagttggaaaaagatactccatgctgatagaaaccaaaagaaagcagggatagctaaacttatatcagacaaaatagactttaagtcaaaaactgtaaaaagagacattatataatgataagagcatcagttcatcaagaggatataacagttatatatgcacccaacattgaaacacctaaatacataaatattgaaggatctgaagggagggataaattgcaatacaataatagtaggagactttaatactctacagataatccagacagaaaattaat

SEQ ID NO: 36884 - DNA, 440 bp, Homo sapiens
  misc_feature (1)...(440): n = A,T,C or G
cccacgcgtccgggggagagaagggctatttccggctgcaccgagggagcaatacctgtggcatcaccaagttcccgctcactgcccgtgtgcagaaaccggatatgaagccccgagtctcctgccctccctgaacccacctggccccctcagctctgtcctgttaggccaactgcctccttgccagccccacccccaggtttttgcccatcctcccaatctcaatacagcctgaataaaccaagacaagacctctgaaaaaaaaaaaaaaaaggggcgcccgttttaaaggacccctgggggggcccaagtttacccgggcatgcaaggtaaaacttctttccctagagggaggcgaattataacctacctggggatcttggaaaagaaaccttatttttgtggngggacataatgggccaacctccctacagaaatta

SEQ ID NO: 36885 - DNA, 413 bp, Homo sapiens
aattattttaaatgcatttatcttttttgacactattcagtggaatgtgtaagctagctaattcttgttttctgatttaaagcacttttaaatcttatcctgccccctaaaaacaaaaggttttgatcacaaggggaaatttaagattgttaaccctgtttttcagaagggctactgttaattgcacataaacatgaaatgtgttttcccctgtgtactaacacattctaggcaaaattcaaacttatagtggtaaagaaacaggttgttcacttgctgaggtgcaaaaattcttaagacttctgtttgaaattgctcaatgactaggaaaagatgtagtagtttactaaaattgtttttctaccatatcaaattaaacaattcatgcctttatagggtcaggcctacaatga

SEQ ID NO: 36886 - DNA, 401 bp, Homo sapiens
aactatgggcatttttcctattttaaatttaatagtgtccaaaggtcatcctaagttttggcatttgttgaatgggggaagagcatggaggttttcacacgcaatttttatgggtcagacgtggtagtggcacacatcacttctgttgacatttcattggcttggtcttagtcacgtggccatgctaactgcaagggaggctggaaatgtagtctagttgactcagggaaaaaaatgcctttggttatcaattagcagtctctttcgtgtggtcaagggaaacaacatcagcaagacattgacttctctgtgagctacctaattatttcgtttttgcttttccttttctcattttcccatgtttttgcaattactctccacttttccccataaatatcctg

SEQ ID NO: 36887 - DNA, 414 bp, Homo sapiens
aacgagacgaagacggaaccggagccggttgcgggcagtggacgcggttctgccgagagccgaatatggcagtgaacgtatactcaacgtcagtgaccagtgataacctaagtcgacatgacatgctggcctggatcaatgagtctctgcagttgaatctgacaaagatcgaacagttgtgctcaggggctgcgtattgtcagtttatggacatgctgttccctggctccattgccttgaagaaagtgaaattccaagctaagctagaacacgagtacatccagaacttcaaaatactacaagcaggttttaagagaatgggtgttgacaaaataattcctgtggacaaattagtaaaaggaaagtttcaggacaattttgaattcgttcagtggttcaagaagtttttcgatg

SEQ ID NO: 36888 - DNA, 394 bp, Homo sapiens
cggacgcgtgggcggacgcgtgggcggacgcgtggtcggcgttgttctggattcccgtcgtaacttagagggaaattttcacaatgtccggagcccttgatgtcctgcaaatgaaggaggaggatgtccttaagttccttgcagcaggaacccacttaggtggcaccaatcttgacttccagatggaacagtacatctataaaaggaaaagtgatggcatctatatcataaatctcaagaggacctgggagaagcttctgctggcagctcgtgcaattgttgccattgaaaaccctgctgatgtcagtgttatatcctccaggaatactggccagagggctgtgctgaagtttgctgctgccactggagccactccaattgctggccgcttcac

SEQ ID NO: 36889 - DNA, 400 bp, Homo sapiens
  misc_feature (1)...(400): n = A,T,C or G
atattctccagcatatcttttctgttgtgacagacacttcacatactgctggtttaacaatgcatgcatcaattcttgcatatatgtttaatttggttgaagaaggaaaaataagtacatcattaaatcctggaaatccagttaacaaccaaatctttcttcaggaatatgtggctaatctccttaagtcggccttccctcacctacaagatgctcaagtaaagctctttgtgacagggcttttcagcttaaatcaagatattcctgctttcaaggaacatttaagagatttcctagttcaaataaaggaatttgcaggtgaagacacttctgatttgtttttggaagagagagaaatagccctacggcaggctgatgaagagaaacataaacgtcaaan

SEQ ID NO: 36890 - DNA, 430 bp, Homo sapiens
acagacagttgcggtgggtgtcatcaaagcagtggacaagaaggctgctggagctggcaaggtcaccaagtctgcccagaaagctcagaaggctaaatgaatattatccctaatacctgccaccccactcttaatcagtggtggaagaacggtctcagaactgtttgtttcaattggccatttaagtttagtagtaaaagactggttaatgataacaatgcatcgtaaaaccttcagaaggaaaggagaatgttttgtggaccactttggttttcttttttgcgtgtggcagttttaagttattagtttttaaaatcagtactttttaatggaaacaacttgaccaaaaatttgtcacagaattttgagacccattaaaaaagttaaatgagaaaaaaaaaaaaaaggggcggccgttttaaaggatccc

SEQ ID NO: 36891 - DNA, 442 bp, Homo sapiens
  misc_feature (1)...(442): n = A,T,C or G
ctgcggaagcccagacaccaggaaggtgagatcttcgactcagaacaagataaatatgagattacggagcagcgcaagattgatcatgaaagctgtggactcacaaattgataccaaaaatcaaagctattcctcatgtccagggctacctgcgatctgtgttcgctctgacgaatggaatttatcctcacaaactggtgttctaaatgttttaagaacctaattacatagctgactacaaaaaaaaaaacaggggcggcccgtttaaggtcatgcttgaggggccccacctgaaccgggccgaccttcactttagcttcgcccctatggggaccgaatttaagaccttcctcgtcattttgtaaaaaaccccttccttggggggggcgacctaatggtccactcccgccaagacaatcacacgctatgtggtaattactan

SEQ ID NO: 36892 - DNA, 407 bp, Homo sapiens
ccctggtctcgtgggggctcaggtgggccggggtttgttcttgccttccatcagagtgtgttaaacaggcctcaggccttcctgccatcagcactgggcccatagggctgggaatccagtgggggtctccatgtggttcccagctggggcattcctgggcctgcaagcggtggccgtcacttgaccttgaccagaagccccaagccggtaaatgctgtgctgtcctgagtgtggtgcccagagcagggctgcaaagacctcccgcagccacagccatggtctgggccaccatgcctgctgtccagatgagcccaggcaggagcctgtgtgtccacagggtgagctgtgcctgagggccactctgggtctccttgttgggctcagcgccagctcctgaagaacccact

SEQ ID NO: 36893 - DNA, 455 bp, Homo sapiens
cccacgcgtccggacagacagttgcggtgggagtcatcaaatcagtggacaagaaggctgctggagctggcaaggtcaccaagtctgcccagaaagctcagaaggctaaatgaatattatccctaatacctgccaccccactcttaatcagtggtggaagaacggtctcagaactgtttgtttcaattggccatttaagtttagtagtaaaagactgggtaatgataacaatgcatcgtaaaaccttcagaaggaaaggagaatgttttgtggaccactttggttttcttttttgcgtgtggcagttttaagttattagtttttaaaatcagtactttttaatggaaacaacttgaccaaaaatttgtcacagaattttgagacccattaaaaaagttaaatgagaaaaaaaaaaaaaaaaaaaaaaaggggggcccgttttaaagaacccctct

SEQ ID NO: 36894 - DNA, 418 bp, Homo sapiens
  misc_feature (1)...(418): n = A,T,C or G
actgggggaccgactcaaggctgctggtcagcgcctcccaggatgggaagctcatcatctgggacagctacaccaccaacaaggtccacgccatcccgctgcgctcctcctgggtaatgacctgtgcctacgcgccctcagggaactttgtggcctgtggggggttggacaacatctgctccatctacagcctcaagacccgctagggcaacgtcagggtcagccgggagctgcctggccacactgggtacctgtcgtgttgccgcttcctggatgacaaccaaatcatcaccagctctggggataccacctgtgccctgtgggacattgagacaggccagcagacagtgggttttgctggacacagtggggatgtgatgtccctgtccctggcccccgatggccgcacgttagtgtn

SEQ ID NO: 36895 - DNA, 412 bp, Homo sapiens
  misc_feature (1)...(412): n = A,T,C or G
cccacgcgtccggttgcccatctctacctggctgtggacaaaaggttatctgctcttggccatctggtggtggtggcggcccagagtctgaagaaatggcacagggacagtgaatggtagtgttgccaccctgtgctgaggcctgaggcctcttcctcagctttatctccctttccttcactcaagggccatttccccagtccctatctcccccatcccctcccggcttataggccccacaggtgctatttgttgtgctggcccaggcgtggggctaccaagcaaaggcttggcatataccaaaggccagctgcatgcccatcagtctggtctttttcctctgcggncatgttggctttcatgctggatcaaatgttttactttcccagactggtggcatctgagttccccn

SEQ ID NO: 36896 - DNA, 409 bp, Homo sapiens
attctgaaacgacttctttgggattaaagaagtgtatgtttctagaagactgcggaaaacatcatttctttggctgtgactttcttggagcaggcagtggtgagcaaggagtgtgtccccgtggaccagttcatggagcacctgcttcccagcctcctgagcctcgcatcagatcctgtgcccaacgtgagggttctgctagccaaggccctaaggcagatgctgttggaaaaggcgtattttagaaatgctggtaaccctcatcttgaagtcattgaagagaccatcttagcattgcagtcagaccgggaccaagatgtttccttttttgcagccctagaaccaaagcggcggaatatcatagacactgctgtactagaaaaacagaattaactacttccgtgatgag

SEQ ID NO: 36897 - DNA, 381 bp, Homo sapiens
  misc_feature (1)...(381): n = A,T,C or G
cccacgcgtncgcaggttcacccacccatccttgatgctaggttctggtgtacctggtcacccagcagccatcccccacccggccattgtgcccccctcagggaagcaggagctgcagcccttcgaccgcaacctgaagacacaagcagagtccaaggcagagaaggaggccaagaagccaaccatcaagaagcccctcaatgccttcatgctgtacatgaaggagatgagagccaaggtcattgcagagtgcacacttaaggagagcgctgccatcaaccagatcctgggccgcaggtggcacgcgctgtcgcgagaagagcaggccaagtactatgagctggcccgcaaggagaggcagctgcacatgcagctataccc

SEQ ID NO: 36898 - DNA, 411 bp, Homo sapiens
aatgattcggatactaagatgcatcgtttgaaatcatctagtgtgttgtatgcagttatcctcaaaaacatcagcgatgtctgaacctttaaaacatctgttagagcaaaattaaaagagcatttggtagtaatctaactttttgttcagttaataagtggttgataaagtttccatatttttctggaaaagttaaaaaaagttacatgtcatttggagaaaatacgtaatcagaaatttgtgcatagattgatgccaaaaaagacatttccagcattgtggaacatggtgagacactatataaaattccagaaagaaagcaactggatttacagatttattgtgagacacaaattcactgctgcctttacactaagaaatgtatatgttaaccatatatgctgtatttat

SEQ ID NO: 36899 - DNA, 406 bp, Homo sapiens
  misc_feature (1)...(406): n = A,T,C or G
cccacgcgtncgctaatttgctttttgcccaacctctggagaactgtgagagtcactgtttgtcttctgttgggtttggcttgagaaagcctctctccttgtgtagcttgtgtgccttgagtggctgagctcctgggccagaatccaggtgagttctcagtaagggtaagtctagagttttcacattaagaagcttagaaatgatcttttgaaggtttgaagtattaactgcttgtttttaagtactttttgttgctagccttgctttgttttctacactttgagagagattgagaagaaaccataaactggtttgatggagttgagtaagctcttgaccctagaattggaggaggagattttaggttaactagtgaaacttcttgtttcggttcgggaaaccctt

SEQ ID NO: 36900 - DNA, 418 bp, Homo sapiens
  misc_feature (1)...(418): n = A,T,C or G
cttggggcagcattctctgcatctgggtctgctgtcagttgctggttgcttctgaagatgcttttagtgccagtgtcctcacagccatgggtggcctgagtggggagtggcctcagtggcctgggagttgaaggcagctgtattcttgcctcttggaaactcagcgaaatgtttggttgctccatcattccatggagcttttggagtgaagctttgggccaccaggactccatgctgttggtagacttgctcttcagaggcccattttatttacctcttccattgccccgctcagtttaggcaggttatttaatctcattaagctctagttttctcacctcttaaataaggataataactctacataatagagttgctatgaagatgatacactatgacatgtgtgaagaatttagcn

SEQ ID NO: 36901 - DNA, 415 bp, Homo sapiens
  misc_feature (1)...(415): n = A,T,C or G
gcgcagaccacagccgtacccatacccttcaaaaaaattattatcagaatctgcacaacctttgaaaaaagtggaggaggaacaagaggcggatgaagaagatgtttcagaagaagaagctgaaagtaaagaaggaacaaacaaagactttccacagaatgccataagacaacgctctctgggtccatcattggccacagataaatcctagttaaattttatagttatcttaatattatgattttgataaaaacagaagattgatcattttgtttggtttgaagtgaactgtgacttttttgaatattgcagggttcagactagattgtcattaaattgaagagtctacattcagaacataaaagcactaggtatacaagtttgaaatatgatttaagcacagtatgatggtttn

SEQ ID NO: 36902 - DNA, 407 bp, Homo sapiens
  misc_feature (1)...(407): n = A,T,C or G
ggacgcgtggggtgaaattattttttctcatattcttatgcgaaccaaattaagggttacttcgggctattttttctcaaaatggaaatgttttttattataaaatccatgctctttgaaaaaatcaccctgtattgaagtacataaaatacaaaaatgaaagtcattttgactcccactccccaaagataatcaccgtgtacagttaattccttgtttaaaacgagagaaggcaacatttgatcacagctgtgtgtgcctcactctgcctggggatggcctgtggtgattcatggactcatgttctctgttcacattactcaggttggtaagaattgccaggtaaaggaaaggggagtgttttgcattgggctgatttaaaattatttgattaactgggctgctan

SEQ ID NO: 36903 - DNA, 403 bp, Homo sapiens
  misc_feature (1)...(403): n = A,T,C or G
aacttttcttttttctttttccattaggagaacattctagttggtaaatttcaaaatgtgcttgacacctgccttaaatagcacagacctattgtgcacatctttaaattatttcagctggcagaaaagaattacatttaaaactgaaatcaaggcctcaatacaaagattatcctggctcttttctatctctgtgggcctaattgaaatatgtactcttattttagacacgcctctgttaaaacagaccaggttttcctggtctcagacctatgatgacttgtccctttgatgtcactactgtgaattgaatataattagtaaaaatagacgatgaataaataacactttatagtaagaaaacaatatattttggccatctaaaaatgagaattataattan

SEQ ID NO: 36904 - DNA, 411 bp, Homo sapiens
  misc_feature (1)...(411): n = A,T,C or G
tcttgctctgttacccaagctggagtgcagtggcacgatctcagctcaccgcaacctctgcctcctgggttcaagtgattctcttgcttcagcctcctgagtagctgggattataggcatgcaccactaggcctggctaatttttgtatttttagtagagatggggtttttccatgttggccaggctggtcccgaactcctgacctcaagtgatccgcgcacctcagcctcccaaagtgctgggattacaggcatgagctaccatgcctggccttctcatgtgttttctgattaaggctcttgacttccaaggctgtgtggggagatggggcgggggctcttggactgatataaaactttgtcaaatgtagttctttgaatggagcttgaaacgccgcatattcttgctcn

SEQ ID NO: 36905 - DNA, 468 bp, Homo sapiens
  misc_feature (1)...(468): n = A,T,C or G
caacaatttgcttatagaataatgattcttcagtctctaacgactcagctccttacatgagctttggaggaggcaatgaggcaacacctgcaggtctaaatcgagatgggaatgttcacccttcgtgggcttcacaagattgattcctgagtagctgggattacaggcacctgccaccatgcccaggtgatttttgtatttttagtagagatggaggttcaccatgttgaccaggctggactcaactcctgacctcaggtgatcctcccacctcggcctcccaaattgctgggattacaggcatgagccaccgagccctgcctcttttttttccctttttaatagagacaaggactcactctgttgcccaggctggactcaagctccccagataaagtgattntcttgcctcgacctcccaaagtgataggattataggggttagccaccatgcctcgctgtattgtn

SEQ ID NO: 36906 - DNA, 431 bp, Homo sapiens
caggaacaccattttctttgcaaccaagcctgtcccagagtgggtggcagcgaatacttttaacttttattctccttcagagcaacatcagaattgcctgagaactgcaatgaacaatctgacaaatgtgaagctggccaaaagtcggaaaatgagaatgagggtaatcctggagaaattgtgacaacaatttgaaaattgtggttgcattttaaagtgtgaacactcccctatgtaaatatgctgacaataaattgtatggagaatggtatttaaaaagggtttggagacttttcacctgtcctataaaattttgaattgtgtatgtgatctacatagaaagaatattatagagtaggttgaactctttatagccgaatacagccttatatatgcttgtatagcatccactggcagacgtaatagttgtg

SEQ ID NO: 36907 - DNA, 396 bp, Homo sapiens
caggtgatgaattgggctgggctggcctggctgtggtgaccctggtcttctcctgtctccagagagatcttggtacaggagagcaacgtgcatagggtggactcgccagtcacagtgtgcggcgacatccatggacaattctatgacctcaaagagctgttcagagtaggtggcgacgtccctgagaccaactacctcttcatgggggactttgtggaccgtggcttctatagcgtcgaaacgttcctcctgctgctggcacttaaggttcgctatcctgatcgcatcacactgatccggggcaaccatgagagtcgccagatcacgcaggtctatggcttctactatgagtgcctgcgcaagtacggctcggtgactgtgtggcgctactgcact

SEQ ID NO: 36908 - DNA, 408 bp, Homo sapiens
  misc_feature (1)...(408): n = A,T,C or G
tggtgttcctgtgccactccacaatggcctcctttaagagggcccccctctcactccctcctctccccacagaccctacgtccgctccaagggccggaagttcgagcgtgccagaggccgacgggccagccgaggctacaaaaactaaccctggatcctactctcttattaaaaagatttttgctggcnnanaaaaaaaataaaaaaaaaaaaaaaaaaaaaaaagggggggggccttttaaaaaatccttgggggggcccaattttaccgggggggggaaagaaaaatttttttttttttgggggggcaaatataaacccccggggggtttttgggaaaaaaccctttttttggggggggggcttttgggccccacccccccacagaaattaaagccctgggggaan

SEQ ID NO: 36909 - DNA, 462 bp, Homo sapiens
cgttaagttttgaaatgaaaacctgtactaggcaaatccttcatattctgttaaatctaactagatagactttatgaagtagaagtattgtaaatcagctttcccaaaaatgacatggcagatattctaaagcaaaattttaataatttacattttttttctccattacagctactactccatctaagccaacatgtgatgaaaaatatgcaaacatcactgtggattacttatataacaaggaaactaaattatttacagcaaagctaaatgttaatgagaatgtggaatgtggaaacaatacttgcacaaacaatgaggtgcataaccttacagaatgtaaaaatgcgtctgtttccatatctcataattcatgtactgctcctgataagacattaatattagatgtgccaccaggggttgaaaagtttcagttacatgattgtacacaagttgaaaaag

SEQ ID NO: 36910 - DNA, 422 bp, Homo sapiens
  misc_feature (1)...(422): n = A,T,C or G
cccacgcgtncgctcagcgccagcccattggcgcctgcgttgcccgcatccaggccctgcggcaggccctgtgctagcgtggtcgcaccaggaacgcaggtgctgggctgtcggggaggcctcaggccacctccaggaacagaacacagttttaagtttgattttttttatttcaaaatgctttgcaattaaatgaattactgttcggcaaacctaaagagaaagctcaaggggggggcgcgcttaaaggattccttggggggcccaatttttcggggggcttgaagggaaattttttttccttgagggagctgtaataaaaccagctgggggttttttgtgagaaaacctttcttctggggggggagctgatgggcccactcccccatcaatttttaaacgttttggggcaaataaaattt

SEQ ID NO: 36911 - DNA, 409 bp, Homo sapiens
  misc_feature (1)...(409): n = A,T,C or G
acagagcagagcagcactacagatgagccctctgcagaacaggttagctgggaagaaagtcaggagagccctctctccagtggcagtgaggtgccatataaggactcccagctaagtagcgcagacctaagtttaattagcaaacttggtgacaacactggggagttacaggagaaaatggacccattgcctgtagcctgtcgactcccacatagctctagtagtgaaaacataaagagtctcagccacagccccggtgtggtgaaggagcgtgctaaagaaatcgagtctcgagtggttttccaggcagggctcaccaaaccatcccaaatgaggcgctcagcttctctcgccaaattaggttacttggacctctgtaaagactgcttaccagagagggagcctgccn

SEQ ID NO: 36912 - DNA, 427 bp, Homo sapiens
  misc_feature (1)...(427): n = A,T,C or G
cccacgcgtccggaagcgaatgcgcaggctgaagctcaaaagaagaaagatgaggcagaggtccaagtaaaccgctagcttgttgcaccgtggaggccacaggagcagaaacatggaatgccagacgctggggatgctggtacaagttgtgggactgcatgctactgtctagagcttgtctcaatggatctagaacttcatcgccctctgatcgccgatcacctctgagacccaccttgctcataaacaaaatgcccatgttggtcctctgccctggacctgtgacattctggactatttctgtgtttatttgtggccgagtgtaacaaccatataataaatcacctcttccgctgttttagctgangaattnnnnancnnactttnntataaacaaaaaacctattaaggatccgtcggtccgggt

SEQ ID NO: 36913 - DNA, 408 bp, Homo sapiens
tgagcctggactttgacaatatagaacaactgatgtttctgaaaatgaacttgaaaaatgttaactacgattattctacgttggttctgagctgggatcctgagcagaatgaagttgttcaaagcagtgaaaaagaaatactgccttaatttctttttctccatttaaaatgggcaactttttgctgtgttactgtatcttaatagctgtagttgttaaatataatcattatctttataaacacatctggggaaacctgaaatcacacaagggctgaaaattcctcagaggcaatataattttgataaaatgaagattaaagatttcatagctataactgtggcgctagcacttgaaaattttgcttataccaatgagagagaagatatttttaaaaagaaaaaaaag

SEQ ID NO: 36914 - DNA, 391 bp, Homo sapiens
aaagtatgcctgggaggtggtcattatattacttgtgggagagtcggctaccccaggaaaccagggtgtccactgctgaatctaagggatctgccttgccgagtgccacctcccagctgcaggaagtggggagaaactaagaagatgagaaagaagttcttggaggataattcgtagcctctgtgcccctcagtcacttgttcagtcactcatccacttagtccttcatgtgtcattgactccgaccttcagttacccatgcttttagctgccatcactcaggcctccattcactgcctgcctcccacagtcactcatgcctccatccactttgtcagcatctcactgagccaaggcactccaaggcttttttagcaacagttgcagatcg

SEQ ID NO: 36915 - DNA, 456 bp, Homo sapiens
  misc_feature (1)...(456): n = A,T,C or G
nattgatcngtatcggaaccatgatgacatccgggacgacccacgcgtncggcattctatctcactgctgttctctgctctccccgtttgtggaaggctttatgtccaccatggcgcagcgcctggtgcgcgtgctgcagatctgtgctggccacgtgcccggtgtctcagctctgaacctgctgtccctgctgagaagctctgagggcccctccctggaggacctgtgagggtggctggcccctgggctgccccttctcatggcttcgtgctgactccataaacattctctgttgaggatgtccagtcagggcttgacaggcccaggctcagcccgccgtggctgggaaggttccctgcagtgccagtgctgcagcagggagagctgggcagaagcagcgagggggcccagctggcgagactggagccccctcccactcccacactcactcttgg

SEQ ID NO: 36916 - DNA, 399 bp, Homo sapiens
gtctatctgccacttggtaccagaccgctgatctagaccattttcatacctgcctcctgtctcttgtttctacttagattttcaattctcctcatcccatctctcctaacttctttaccctctaccccttcttaacttccctggctttcaaatgccttctgtatcctaacacccccatctctgctttccagccttcccctctcaccctgcttttccccatttgaggcttgtagtttgccaggaggggaatgggcagcttgtatttgcccattctcttagttaagaggcacccaatccctgtaccaagcaggggcacatcagcagcagccgggcagacttgtcctcttgcagcctgtgcgccacctgctgcctccagtgcctcctctagcctgctgagag

SEQ ID NO: 36917 - DNA, 406 bp, Homo sapiens
attggttttaaaaccaagctggctgctttgactcttgttgtgtggctctttgccatcaacgtatatttcaacgccttctggaccattccagtctacaagcccatgcatgacttcctgaaatacgacttcttccagaccatgtcggcgattgggggcttgctcctggtggcggccctgggccctgggggtgtctccatggatgagaagaagaaggagtgggaacagtcacagatccctacctgcctggctaagacccgtggccgtcaaggactggttcggggtggattcaacaaaactgccagcttttatgtatcctcttcccttcccctcccttggtaaaggcacagatgttttgagaactttatttgcagagacacctgagaatcgatggctcagtctgctctgg

SEQ ID NO: 36918 - DNA, 397 bp, Homo sapiens
acacaactgtgttcactagcaacctcaaacagacaccatggagcacctgactcctgaggagaagtctgccgtttctgccctgtggggcaaggagaacgcgtatgaagtaggaggtgaggccctgggcaagctgctggtggtctacccttggacccagaggttctttgactactttggggatctgaccactcctgatgctggtatgggcgaccctaaggcgaaggctcatggaaagaaagagcttagcgcctttagagacggcctggctcacctggacaaccttataggcacctttgccacactgaaggatctgcgctgtgactagctgcacttggatcctgagaacttcatgctgctgggcaacgtgctggtctgtgtgctggcccatcactttggc

SEQ ID NO: 36919 - DNA, 378 bp, Homo sapiens
gattgactggtcagttgctacaatcagaatatgctttcttggaccatgtttgagactcagaagaatgggcctttctgccataattcttcactagtcaagaatgccagcagtttctttgtataaagagacctgcctttaaaatcatacattctgaacattttagtcaagctacaacaggtttggaaaacctctgtgggggaggggcgagtataaagttttcctcttttttaactgttccctttgcccttcaaactgcagatatttttttttttaaggggggacttctccctacttgattaaagattgagtggaattctagatgtggccatttgagccataattttttggttttattttgatattgattttcttttcccc

SEQ ID NO: 36920 - DNA, 415 bp, Homo sapiens
ttctccactttagctgctgcagatgctgtttgaagaagctctgcccctcagctgctctgatcctgtgcttagcactcttagcctggtgcagggcctgctgtctgctcactctcaccatgtcctgcccagggcctgaccctcctgaggggcccgggacccagcgtgtgtggcaaggggctctacggatcctacagctcccaggagccccagactgccccctgctgcgggtgttggctggtgaagttgttggtgaggaggcggagggctctttgccctggattgtctcatggctcttggaaggaaacaactacagtggcctacttcttcgcctggacccccaaggtggccagggggagagtgtggagttctttgggaagctctgagatctgtccttaggcctgcctcacccatcacg

SEQ ID NO: 36921 - DNA, 408 bp, Homo sapiens
aaataatgttactcagatccttaccccagctcattgttttcgttgtttaaggtattcgaatattgtcacaatgcataatagtttttagtaccttacttggtaaagagaaatactgttcagctgtgtgcttttagcagtgaagcccacgagcctctggtcataggagaaaactaaggttcttttagatagaaaggtactttggtttaaagaaaatgttagggcattttctcaagaatagaacttttgcatctgtactctttcggtcttagagaagaaaaactttctcctgggtggggaaatgacacaaatgactctactggatgcatgcaaacttggaaatgaaactagtttactcttctttgcaaattgaaaggtgaaaaataaaagcgatgacagggttctttccat

SEQ ID NO: 36922 - DNA, 422 bp, Homo sapiens
gctgggttgagagctgtccccggttctccgttctgctctcgggggcaccttccggggttcctaagccgcggggcccctcgctgcccctcgaggccctttccctgacctaggctttggcctgggctactcgttccggagccgccatgtcgtccgacttcgaaggttacgagcaggacttcgcggtgctcactgcagagatcaccagcaagattgcgagggtcccacgactcccgcctgatgaaaagaaacagatggttgcaaatgtggagaaacagcttgaagaagcgaaagaactgcttgaacagatggatttggaagtccgagagataccaccccaaagtcgagggatgtacagcaacagaatgagaagctacaaacaagaaatgggaaaactcgaaacagattttaaaaggtcacggatc

SEQ ID NO: 36923 - DNA, 439 bp, Homo sapiens
  misc_feature (1)...(439): n = A,T,C or G
cccacgcgtccgaggcagtcctcatgtgagttaccccatacattccttaatactgtttccccagtcaccgtcccaggatctttcatgattatcttgaccttcattcaaacctagaacaaatcagtgttacacccctcagtgacatggctgtttgtctcccactattggggcctcagtcctatactcagtctctcctctgtccccacctggaggcaggtttgtccataaccaggattgggaggcagctcagcgtgtggctgaggctcacgaccctgacagtgtcgccgaggtgcttgtgggacaggcccggggggccttggaggagaaggactttcagaaagcagaagggctgctgctccgggcccagagaccaggcctggccctcaattattataaggaggctggattatggagtgacgctctgcgcatctgcaaggan

SEQ ID NO: 36924 - DNA, 232 bp, Homo sapiens
ttttcttttttgcgtgtggcagttttaagttattagtttttaaaatcagtactttttaatggaaacaacttgaccaaaaatttgtcacagaattttgagacccattaaaaaagttaaatgagaaaaaaaaaaaaaagggggggccgttttaaagaatccttgggggggcccaagtttacccgggcttgcaaggtaataattttttccttatagggaggcgaattaaaaccta

SEQ ID NO: 36925 - DNA, 425 bp, Homo sapiens
agaccctctatgtgtcctcacatggcagaagcttgctctggtctctttcataaagacacagtacatttgtaaatttatatagactataaaggcacgaaattcacatatgaatttggggcagggtacaaacattcacaccatagcaaccagtacaatcttttcttgaataaatgactttgacccttttttttaaatttattttatttatttttgtagacagtcttgctctgttgcccaggctggagtgcagtggcttgatctcggttaactgcagcctttacctcctggactcaagagatcctcccacctcagcctcccagtaggtgggactacaggcatgggccaccacactctgctaatttttgcattttttgtagagacagggtcccgctatgttgctcaggctggtatcgaactcctgggct

SEQ ID NO: 36926 - DNA, 409 bp, Homo sapiens
tgtaaatccactcatccctgaaagcccagaggaagaggagctctttagacaaggggaattgaacaaggggagaagaattgccttcagctccacgtcgttactgaaaatggcccccagcgctgaggagaggaccaccatacatgagatgtttctcagcacactggatccaaagactataagttttcggagtcgagttttaccctctaatgcagtgtggatggagaattcaaaactgaagagtttggaaatttgccaccctcaggagcggaacattttcaatcggatctttggtggtttccttatgaggaaggcatatgaacttgcgtgggctactgcttgtagctttggtggttctcgaccgtttgtggtagcagtagatgacatcatgtttcagaaacctgttgaggtt

SEQ ID NO: 36927 - DNA, 406 bp, Homo sapiens
tgctgggccgtgtcccggcgcacccggactcccgctgctggttcctggcctggaaccccgcggggaccctgctggcctcgtgcggcggcgaccggagaatccgcatctggggcacggagggtgacagctggatctgcaagtctgtcctttctgaaggccaccagcgcaccgtgcggaaggtagcctggtccccctgcggtaattacctggcctctgccagctttgatgctaccacttgcatttggaagaagaaccaggatgactttgagtgtgtaaccactctcgagggccatgaaaatgaggtcaagtcagtggcttgggccccatctggcaacctcctggccacttgcagccgagataagagcgtttgggtctgggaagttgatgaagaggatgagtatgaatg

SEQ ID NO: 36928 - DNA, 417 bp, Homo sapiens
  misc_feature (1)...(417): n = A,T,C or G
cccacgcgtncgagttcatcttcgtctggacctttcagaggtcaagggagcccttgaccactttttatttttttgagattattcctgccttanaaaaaaaaaaaaaaaaaaaaagggggggggccttttaaaaaaacccctgggggggccaaagttaacccgggaatgaaaattaaaaactttttcctaaaagggggccaaataaaaacccttctgggaatttttgaaaaaaaccctttctttgggggggggacaaaatggcacaacccccctccaaaaattaaaccctttggggaaaaaaaaaaattttaaagggaaaaaggggtaaaacaacctcaaaatccttgctttaaaaaaaatggnnngncannnaaaaaagaccgagctctggggagagaagacaacacctcaccctag

SEQ ID NO: 36929 - DNA, 415 bp, Homo sapiens
ttctgcttccatccaacacatccagaatgcaattgatacggagaagtcacaacaggcactgggtcagaagcgccattacctttttgatgtgcaaaggaataacattgctatggctttggaagttacttaccgggaacgactgtatagagtatataaggaagtaaagaatcgcctggactatcatatatctgtgcagaacatgatgcgtcgaaaggaacaagaacacatgataaattgggtggagaagcacgtggtgcaaagcatctccacacagcaggaaaaggagacaattgccaagtgcattgcggacctaaagctgctggcaaagaaagctcaagcacagccagttatgtaaatgtatctatcccaattgagacagctagaaacagttgactgactaaatggaaactagtct

SEQ ID NO: 36930 - DNA, 418 bp, Homo sapiens
tttggtgaagaaagcatgttgtgcccatattacatttatttcatctctcctaatgaatttggttgctttttatagtctgtgtacatatatgtatggcaccttatttttttctttgtagatgagtaatgaaatactggaaaaagttatttgctaaacataaagggcataatgtattgatttaaaattggattcatggaattttaaggaatttgtctattgtatctatgtaaataggattattttttataatttaggtttttgttttaaaaatcacatttgtgaggtctgtgtatggtagcttatgcctgtaatcccagcggtttgggaggctgaagtggaagatcacttgaggccaggagttcaaggtttacagcgagcttgattgtgcctctgcactccagcttggatgacagagcaa

SEQ ID NO: 36931 - DNA, 474 bp, Homo sapiens
  misc_feature (1)...(474): n = A,T,C or G
ggagcggnnnnnnnnnactgaaggtccgtggancggcntcgaantnccggnngacccacgcgtncgnctctggagtagctgaaactacaggccgcaccaccacgcccggctaatttttgtatttttagtagagacgaggtttcaccatgttggccaggctggtctcagactcctgacctcagatgatccactgcctcggcctcccaaagtgctgggattacaggcgtgagccacaccacctgatcccacctcttaaaagggggaggggggtgcaaaatatctgtactcctggagcttgtagtctaattggaggtatgacacatcaaaagaaaatatgtcatagattgtaagtagtcagagctcattagaggtttaaaagaaataacgtgtaaagtttttagaagaatatctgaccagagttctcagtaaatgttagctgtggaatctcattaatccctttggtcatctgtattn

SEQ ID NO: 36932 - DNA, 404 bp, Homo sapiens
ctcgaggccatgagcagatataccagcccagtgaacccagctgtcttcccccatctgaccgtggtgcttttggccattggcatgttcttcaccgcctggttcttcgtttacgaggtcacctctaccaagtacactcgtgatatctataaagagctcctcatctccttagtggcctcactcttcatgggctttggagtcctcttcctgctgctctgggttggcatctacgtgtgagcacccaagggtaacaaccagatggcttcactgaaacctgcttttgtaaattacttttttttactgttgctggaagtgtcccacctgctgctcataataaatgcagatgtatagcaaaaaaaaaaaaaagggggggccgttttaaagaacccttggggggccccaaccta

SEQ ID NO: 36933 - DNA, 411 bp, Homo sapiens
aagcaatgcgagttgtaaaataccagctctacaagaagctaggctctgtgacggcatagttttcagtagctttatcacaatattcacaatggagaattatatgacatggtagcagaaataggcccttttatgtgttgcttctattttacctcaaattgtagatatagggtaatcaataaaatccatccatgcctttcacacacttagaaaaaaaaaaaaaaaaaataaaaaaaaaaaataataaaaaaaaaaaaaaagaaaaaaataaaaatatatttgtataaaaaagaaacaggttgggggggggcatccgtaattccttggggggccccccctttggagggggaaaaaaaaaattttttttttttttaaggggggtcaaaaaaacccccctttggggggtgggggaaa

SEQ ID NO: 36934 - DNA, 414 bp, Homo sapiens
  misc_feature (1)...(414): n = A,T,C or G
tatgacctacaaagcctaaaatatttgtgtatttgatgctttaaactttggtgacccccagtctattgccttcctactcaaaagtatggtctctggaccagcagtcttggcatcacacatggtataactaaatatgcagaatcataggcttctctctgcactcacaaatacaggcacattgatgctcaaagagaatccaaggaatgtattaggaatatatggccggtacgtgggggnttaanatgattcacattatccttgaacttttaggagaagtttcttatttggaggcttttggaaacagtcttagtcttttaacttggaaagatgacgtattaatcccctccattgctctccaaaagccaataaagtgattacacccgataaaaaaaaaaaaagggcggccgctctaaa

SEQ ID NO: 36935 - DNA, 419 bp, Homo sapiens
gacttctgtaccttcatttgtactttttttaaaaaacaactttcaactggaattccattaaaatatttcaccattatatttttgagtccacattgcttgaggttttaaagaagatttttataatgtgttcctttaacagaatcaacagctgtcagaagcagttgtggtagatccacaaaacgtataaagaaaaatacacgtttcctgaaacaaaacacttggaaaaataagctgctaagaactggcgaattataagtttgcagacagggaactgaagtgtcatctcttggttcaccctggagactgatgtgagtggatctgatgcaatgctgctggaagatttacctgcacaggttgctcctctaaggcaacgcgcagtgcacgattgacgtatgcaccagagctaggctgggcctcag

SEQ ID NO: 36936 - DNA, 419 bp, Homo sapiens
  misc_feature (1)...(419): n = A,T,C or G
cccacgcgttcggtcaggggtagttactttgacatttaagatgtcatttttgaggggtaatcaccttcaagtacaagagtgatagcacgagtgaaggtacttcggaaccactaacacctctgcacagggcagatagccagctcaagttctttttcagagaaagggacttgggcagcggtttaagtacctgtcccttcacctatcagacgaggcagctgacgaagcatctggaccatgcttgggagactgctcaagacagtggtggagctgggtcttgaaccccagtctgcacctaaaaaactaaaggaaatggattttttttttttttttttgaaacggaaacccactttggggcccaaaggggagggcaggggtaaaattttggttaactacaagctccccctcgggggttcaagcan

SEQ ID NO: 36937 - DNA, 422 bp, Homo sapiens
atggcgtccggcagtaactggctctccggggtgaatgtcgtgctggtgatggcctacgggagcctggtgtttgtactgctatttatttttgtgaagaggcaaatcatgcgctttgcaatgaaatctcgaaggggacctcatgtccctgtgggacacaatgcccccaaggacttgaaagaggagattgatattcgactctccagggttcaggatatcaagtatgagccccagctccttgcagatgatgatgctagactactacaactggaaacccagggaaatcaaagttgctacaactatctgtataggatgaaagctctggatgccattcgtacctctgagatcccatttcattctgaaggccggcatccccgttccttaatgggcaagaatttccgctcctacctgctggatctgcgaaa

SEQ ID NO: 36938 - DNA, 398 bp, Homo sapiens
aaagtgataagctacttgctaactatcaatatcaatgttttcattatgatatttctctttggagaagaccagtgtaaaagaggagttgatcagtattcctttcctgtcaactgaccttcatgttgtactctcttcctcaggcttcatctttcttaatttaaaaattcatgtttgtctgtagtaattacaaaaattcattataggatttccaagttctaatagttgctttctagatttggtcttcattatgatactgctcctatatttttcaacactttttcttaaatgaaatagtactaaagcgacaagtacgtacatacatttttttcctctcactcaggattgggtaaggccaaatagtcatattttaattctttggttaaactttatgattaaaa

SEQ ID NO: 36939 - DNA, 404 bp, Homo sapiens
ctttcttgctgcttttccaactataatcattttgctcttgctttaacaaaagaaggggcacagcaatttagtaaatttgtgtaataacattaaaggttgattgactctattcttccctttcagtccaatactactttccgtttgtcaggttgactgctataattaccagccttctcatatttcctcttgccctatttttttatttctgtgggttatgaaatattcgactaaatgttgatagctgaagggcatgttagctcacacctgtaatcctagcactttgggaggccgaagtgggcaagtcacttcaggccaggagttcaagaccaacctggccaacatggcaaaaccttgtctctactttaaattcttaatagctatgtgaagtgcatagtgatgtcatg

SEQ ID NO: 36940 - DNA, 418 bp, Homo sapiens
  misc_feature (1)...(418): n = A,T,C or G
accaactcacctggccgctaagttgctgatgggtagtacctgtactaaaccacctcagaaaggattttacagaaacgtgttaaaggttttctctaacttctcaagtcccttgttttgtgttgtgtctgtggggaggggttgttttggggttgtttttgttttttcttgccaggtagataaaactgacatagagaaaaggctggagagagattctgttgcatagactagtcctatggaaaaaaccaagcttcgttagaatgtctgccttactggtttccccagggaaggaaaaatacacttccacccttttttctaagagttcgtctttagttttgattttggaaagatgttaagcatttatttttagttaaaaataaaaactaatttcatactatttaaaaaaaaaaaaaaaacggcn

SEQ ID NO: 36941 - DNA, 384 bp, Homo sapiens
cgtgtactgccggaagcggatgaagaaggtgtcaggtgcctgtatccagtgctcctacgagcactgctccacgtccttccacgtgacctgcgcccacgccgcaggcgtgctcatggagccggacgactggccctatgtggtctccatcacctgcctcaagcacaagtcggggggtcacgctgtccaactcctgagggccgtgtccctaggccaggtggtcatcaccaagaaccgcaacgggctgtactaccgctgtcgcgtcatcggtgccgcctcgcagacctgctacgaagtgaacttcgacgatggctcctacagcgacaacctgtaccctgagagcatcacgagtagggactgtgtccagctgggacccccttccgaggg

SEQ ID NO: 36942 - DNA, 434 bp, Homo sapiens
ggagctcttctgagacgcactgggggccgtttgaatccttcttatctgtgaaatgcagttaacacatgagctggacctatttcccgaatgcagggtaacccttctgttatttaaagatgtaaaaaatgcgggagacttgagaagaatggccatggaaggcaccatcgatggatcactgataaatcctacagtgattgttgatccatttcagatacttgtggcagcaaacaaagcagttcacctctactaactgggaaaaatgaagacaagaactctatctactgaaattattttcaacctttccccaaataacaatatttcagaggctttgaaaaaatttggtatctcagcaaatgacacttcaattctaattgtttacattgaagagggagaaaaacaaataaatcaagaatacctaatatctcaagtagaag

SEQ ID NO: 36943 - DNA, 415 bp, Homo sapiens
aaaactagtcaaaagaggataaaaaatgaattaagtaaaattaatgaaaaccttctcataaaatactgatgcgtcttgtctgagtacccccaattctgcagcagaaaaggcccaaattttactgagataccttccgagttacatattcttgtgcctcctcacttaattcttctactgtataaaaattggttctccaggttttagaatctacagctacatgcttttccttgcatttcattaggctgccagcagggctctgctttcatgagttggcagaagttgtaagcactgtttttgtggtcctccatttctgattaagagggaacagctttcctacactggagtaggtattatatagcatattatattgttattaacagttagaaaacaataataacaaaaaacactaaccttt

SEQ ID NO: 36944 - DNA, 482 bp, Homo sapiens
  misc_feature (1)...(482): n = A,T,C or G
gtggtgagnnnnattgaacgcctgcggtacgttgacgacttgcgggtcgacccacgcgttcgggcgcgatctgtgtcgggcattaccataatagtgttcatgtggacagtctcatggacaccatgtagagaattttggtctcgattcagaaaagagaaagagccagtggttgttgagacagttgaagagaaaaaggaacctatcctagtgtgtccacctttacgaagccgagcatacacaccacctgaagatctccagagtcgtttggaatcttacgttaaagaagtttttggttcatctcttcctagtaattggcaagacatctccctggaagatagtcgtctaaagttcaatcttctggctcatttagctgatgacttgggtcatgtagtccctaactccagactccaccagatgtgcagggttagagatgttcttgatttctataatggccctattcaagatagatctaaatttgatga

SEQ ID NO: 36945 - DNA, 400 bp, Homo sapiens
cccttccaccgccatattgggccactaaaaaaagggggctcgtcttttcggggtgtttttctccccctcccctgtccccgcttgctcacggctctgcgactccgacgccggcaaggtttggagagcggctgggttcgcgggacccgcgggcttgcacccgcccagactcggacgggctttgccaccctctccgcttgcctggtcccctctcctctccgccctcccgctcgccagtccatttgatcagcggagactcggcggccgggccggggcttccccgcagcccctgcgcgctcctagagctcgggccgtggctcgtcggggtctgtgtcttttggctccgagggcagtcgctgggcttccgagaggggttcgggccgcgtaggggcgctttgttttg

SEQ ID NO: 36946 - DNA, 411 bp, Homo sapiens
  misc_feature (1)...(411): n = A,T,C or G
tccctcagaggcagctggttcacctggatgcatctagtcagccatcttgcccagcttctccagtattctaatattttgttttgtctatatgtttacttttagcagtggaggttttattttcatttatctttgggctgttttctattatcttttcatatcaacttcaaaggactcactttagcattttttcatactgtgcatctagttgtgatgaactctctctgcttttgtttatatgagaaatcattcctctttctatttagaacgacagcttttctggatataatgttattagttaacaggttttttttttattacttcaaatatagagatatcattcctttccgaccagcanggtttctgctgataaatctactgatagtttgatgggaccctcttgtatgtcatgag

SEQ ID NO: 36947 - DNA, 409 bp, Homo sapiens
  misc_feature (1)...(409): n = A,T,C or G
cggacgcgtggggtaatttggaaactgttggaaggtggcacagtttaatctaagacagcagtagtacatgggaaaaacagtatgggaagagttctttgtaatgtaaggaaataacaatgtagttctctattaatttagcaaatttgtacattcacaaaaggcagtttgtctactacagcagaaggctggttaactgccagaaaatgtacctccaggccctgcatgccgtcagtaacccgcccggcattggtgctctactgtctttggctagagcttagttgtgtttaaataatcatctttatatttggggttttaattacagttccattagtgcctgtagattagtgaacagaaaattgctttggaagagattctgccctgtagacactatgtgaataactgaagaacn

SEQ ID NO: 36948 - DNA, 191 bp, Homo sapiens
ccttgttcctcatgggtaaagtgataaaactggcaagtggatcaaggaataaaagccaagagaattctgagaccagagggcaagaaatatctagtcgggattcaaggacagaactgaagttcaaatagaaaaagaatgttgcctcaaggattaggagctgagcggacgcgtgggctagttctagatcgcga

SEQ ID NO: 36949 - DNA, 415 bp, Homo sapiens
acgccgcttgtgggcccgactccgctctgtctgcttcgccaccttctccccgagcactgcccggccggccgccatggctaacgtggctgacacgaagctgtacgacatcctgggcgtcccgcccggcgccagcgagaacgagctgaagaaggcatacagaaagttagccaaggaatatcatcctgataagaatccaaatgcaggagacaaatttaaagaaataagttttgcatatgaagtactatcaaatcctgagaagcgtgagttatatgacagatacggagagcaaggtcttcgggaaggcagcggcggaggtggtggcatggatgatattttctctcacatttttggtgggggattgttcggcttcatgggcaatcagagtagaagtcgaaatggcagaagaagaggagag

SEQ ID NO: 36950 - DNA, 399 bp, Homo sapiens
cacgcgtacgcaggaggccgagcagctccggaaccagatccgggatgcccgaaaagcatgtggggactcaacactgacccagatcacagctgggctggacccagtggggagaatccagatgaggacccggaggaccctccgtgggcacctggcaaagatctatgccatgcactgggggaccgactcaaggctgctggtcagcgcctcccaggatgggaagctcatcatctgggacagctacaccaccaacaaggtccacgccatcccgctgcgctcctcctgggtaatgacctgtgcctacgcgccctcagggaactttgtggcctgtggggggttggacaacatctgctccatctacagcctcaagacccgcgagggcaacgtcagggtcagccggga

SEQ ID NO: 36951 - DNA, 410 bp, Homo sapiens
  misc_feature (1)...(410): n = A,T,C or G
cccacgcgtacgaaaggcttcgcgggccagggctcacttggcgctgagaacgcgggtccacgcgtgtgatcgtccgtgcgtctagcctttgcccacgcagctttcagtcatggcctccgggaacgcgcgcatcggaaagccagcccctgacttcaaggccacagcgggggttgatggcgccttcaaagaggtgaagctgtcggactacaaagggaagtacgtggtcctctttttctaccctctggacttcacttttgtgtgccccaccgagatcatcgcgttcagcaaccgtgcagaggacttccgcaagctgggctgtgaagtgctgggcgtctcggnggactctcagttcacccacctggcttggatcaacaccccccggaaagagggaggcttgnngcccctgaaca

SEQ ID NO: 36952 - DNA, 385 bp, Homo sapiens
atacaaaagcggccacgcgcggcgccgctcggtgcagaccatgaattacgtggggcagttagccggccaggagtttgtcaccgtgaaggagctctacaaggggctgaatcccgccacactctcagggtgcattgacatcattgtcatccgccagcccaatggaaacctccaatgctcccctttccacgtccgctttgggaagatgggggtcctgcgctcccgagagaaagtggttgacatacaaatcaatggggaatctgtggatttgcatatgaaattgggagataatggagaagcattttttgttcaagaaacagataatgatcaggaagttatccctatgcacctggccacctcccccatcctgtcagaaagagcttcgaga

SEQ ID NO: 36953 - DNA, 388 bp, Homo sapiens
tcttagcttagcaccaaccaacacagtctcacctagaaaacagatggaagcttcgttgttctcatagaaccaacagcatctgagccctcaacaccaacagcaccatcctctgtagcagacaggcctccctccccacaggcccgctgctgcagcctctatgacactgtccatccccaagtgacatgtggcttcagaagtagagactgaaagagcagtgggatgggagctggtgaccagggtaccccaggaggcatgatgtgccgacagcgctcattgggcagaatggcagttagatatgggacttggcccacagtgggggctgcaaatgctgccactgcctctggccatttaaagagagaggggcaccaacagacaattcggggacctt

SEQ ID NO: 36954 - DNA, 399 bp, Homo sapiens
  misc_feature (1)...(399): n = A,T,C or G
tggaatgtggtcacatggtcacacctagctgcaagaaacactgggagatgtagtctttatttctggcagcaatgcgcccagctgcaagttttcactagagaaaccagatggcagatatcaggggataaccagttatctccaccacagcagcatacagacagcctctcacctgccctgtgggacacctgagttcaatgcccagctagctagccagcacttcttcccactatcacctcccctggggcagcatgatatggggcagtagttcccaagatgagtgattttgcccccactggacttttggcaatgtctagagatgtttttggttggcacaacctggggggtgctaccaccatctagtggactgagaagccctgacatggggaagagtgtgcatgn

SEQ ID NO: 36955 - DNA, 423 bp, Homo sapiens
cgctgggcagcagacagtggagatcgacctgaggcatcggatccagctgcccgacctcgagaaccagcgcaacttcaatgagctctcccgcatcgtcctggaggtgcgcgagagggtgcgccaggagcagcaggaaggcggacacgaggcgggcgagggtcgtggccggcagggcccccgggagtcccagccaagccctgcccagcccatggcagaggcgcccagcaagggcccagatgggacacctggtgaggatggtggcgagcctggggatgccgtatctgcggccgagcagcctgcccagtgtgggcaggggcagccgttcgtgctgcccgtgggcgtgagctccaggaatgaggactacccccgaacctgcaggatgtgtttttatggcacaggcctcatcgcgggccacggcttcat

SEQ ID NO: 36956 - DNA, 432 bp, Homo sapiens
cggacgcgtgggtatatatatatatatatatggaattggaacttattttaaattgttggagttcttttaagaagaatataaattgattattttttttatttaaagggatagttgattcctggggtgttttgaaattaagttggaattaagttgcttaagcatatttatgttgtgagaaaccttaatatgaggtttatcatgccctttttcaagcagatttatgagcagatttctgtcacataagtcgtcttctgcttgagtatcctaatatttcaatgcatcaggggagcgctccactggataagcattttatttcccgcatggcatagtgtttttgcactaaaggctcaaagtgtgagaacctgttctggatttgtttgaaattatttcaccaataaagatcataaataaaaaaaaaaaaaaaaaggggcg

SEQ ID NO: 36957 - DNA, 451 bp, Homo sapiens
  misc_feature (1)...(451): n = A,T,C or G
agggagnnnnnnnnaactgaagccngtagatccgccctcgaattnccgggncgacccacgcgtncgatcatattaaaatgattcaaaacattttctttccacagaaccacatattcttctctttaaacgacctcttccaaaagatcaacaaaaatgaagtttatctggggatcgtcaaatctttttcaaatttaatgtatatgtgtatataaggtagtattcagtgaatacttgagaaatgtacaaatccttcatccatacctgtgcatgagctgtattcttcacagcaacagagctcagttaaatgcaactgcaagtaggttactgtaagatgtttaagataaaagttcttccagtcagtttttctcttaagtgcctgtttgagtttactgaaacagtttacttttgttcaataaagtttgtatgttgcatttaaaaaaaaaaaaaaaag

SEQ ID NO: 36958 - DNA, 173 bp, Homo sapiens
tgaggctacagtgactgaggggagaatcccctcctgttcactctcccaaccctgctccagcccctcagcttcccagaccctcatgcagttggttgtaaattctcccaggagctgttttactgtctacttttcaggattaaaaaaaaaatcaaaacttaaaaaaaaaaaaaagg

SEQ ID NO: 36959 - DNA, 423 bp, Homo sapiens
agtgggaggtgcactttacttcctgactcctttcctttttccagtggttatcgcggcgcccaccggcctctgatctctgagtcttctccaacccacagacgttttttgttgctctggttccaggaccttctccacaactaggccattttccctgccaggtgtcctttttgacctcttgacctctgactcaaagggcctgctccccgtcatgtcttcggcctggagaagagccagctcctgaaggaggcctttgataaggccggcccggtccccaagggcagagaagatgtgaagaggcttctgaaactacacaaggaccggttccgaggtgacctgcggtggatcctcttctgtgcagacctgccgtccctcatccaagaaggccctcaatgcgggctggtggccttgtggatggcaggtact

SEQ ID NO: 36960 - DNA, 475 bp, Homo sapiens
  misc_feature (1)...(475): n = A,T,C or G
agtgactggaattcgnacgngcanannccnccggaantttagggacgacccacgcgtccggtaatttaccaccatgtttggttcctgtttataagatgttttaagaaagatttgaaacacattgtgtgaagaaagcagaagctctcttcccattatgacttcggaaatcacttatgctgaagtgaggttcaaaaatgaattcaagtcctcaggcatcaacacagcctcttctgcaacttccaaggagaggactgcccctctcaaaagtaataccggattccccaagctgctttgcgcctcactgatgatatttttcctgctattggcaatctcattctttattgcttttgtcattttctttcaaaaatattctcagcttcttgaaaagaagactacaaaagagctggttcatactacattggagtgtgagaaaaaaaatatgccccgggaagagacagcctggagctgttgcccn

SEQ ID NO: 36961 - DNA, 409 bp, Homo sapiens
tgcacactggttaaacacagtcttaaagaagaagaaaatggtaccgccgcaccgagcccttcacttcccaggggccttcccaccaggaggaaagccatgttcacagcatattatttctgtgactggatttgttgatagtgacagagatgacctaaaattaatggcttatttggcaggtgccaaatatacgggttatctatgccgcagcaacacagtcctcatctgtaaagaaccaactggtttaaagtatgaaaaagccaaagagtggaggataccctgtgtcaacgcccagtggcttggcgacattcttctgggaaactttgaggcactgaggcagattcagtatagtcgctacacggcattcagtctgcaggatccatttgcccctacccagcatttagttttaaat

SEQ ID NO: 36962 - DNA, 381 bp, Homo sapiens
accaaaccatggtcctttaaagcacgctcctgtcctcctcattgcccagcagtagggaggggcaggggtaaggggacctgaggataaagggtggggaaacagggtcccctgaggcctgtgggggctgcaggggaggaggatgtaccttgtgtctctttcaagtgccttaatccgagccagcagggccttctgcttgcctgctgccatactgtatgtaagaaagtgttctgtggctgctttgtgtcaagaaaagagcagtcactctcagaatcttgattccccatcagccaaagcaaaagatggctgctgctttgtaggcatgtgcctgcaagtgggaccttgctgggcattatatgccctgtgggggtttcagagaccctg

SEQ ID NO: 36963 - DNA, 377 bp, Homo sapiens
tgatgcttctttgcttactgtgcctactgagtaggccaccccatcatctgatacagagacacctgatctgttctcacattggtctgtcccctgccttcaatgtaactccaagtcagattctctcgtgggatgctcaggcttcctgaaatgagggttactaccagggtggaaaatttcagtttgaaactgaagttcccgatgcgtacaacatggtgcctcccaaagtgaaatgcctgaccaagatctggcaccccaacatcacagagacaggggaaatatgtctgagtttattgagagaacattcaattgatggcactggctgggctcccacaagaacattaaaggatgtcgtttggggattaaactctttgtttact

SEQ ID NO: 36964 - DNA, 379 bp, Homo sapiens
  misc_feature (1)...(379): n = A,T,C or G
caaaaatgagggcttttattttccatttggaacgtgggacaacagaccacaacgcaattccattttgcaagtctttccaagggagaagctgttcaaccacccgtttgggggatgagtgagccgacactttcctttggtctttctgaatcgtaactgcactgctttctggaccatttctaaggcggcctttacaagaagacattcctgtcggagaggagggtggacttcggagaaattctcatactgaagcatgagcttaagagtttctgttagcggtagaggtgttttggacacttcattccttgcaacaccgaggttttgggtgttgacataaagtggaccacacaccacatctgctgccgtattgacactttttttn

SEQ ID NO: 36965 - DNA, 424 bp, Homo sapiens
cggacgcgtgggattatgtacacaaaaataatcatgaatctcaaattggttagctgttgataaagaaggtggtagctaaaccctaggaaattggattgagtaatttcctagcaatcaccagaagaaaagaacatgtaaacaatttgagattcatgattaattatgtacacaaaaatattttccttgtagaaaatagttttccagacacttagccttctgaagtgctcatctcttgcttaaatgatagtctatttagtagtttaaaataaaaataatcactccctatgatctagttaatgtaattatccagtcactgtaactaatctcttgaagggacttttgtgataaagagccaagttcagaagcatagcgtgtaccgaaaatgaagactctcctatctactgctacagatcctgttgaagaa

SEQ ID NO: 36966 - DNA, 397 bp, Homo sapiens
cggacgcgtgggcgagattattttatgataggtatttcaaaggaatagatttgtgaagattaaatcaagtggtaaggttgaaaataaagtatgtttctttcagccatcacgcccgaccgtgattgttcaataaactttattttggaattattttagatatgctaatctaatgtgataagaattctttgaaaagaaaatttttctttttattctacagttaaaaaaaactgaaaacatttcatatgaaatgctttttgaacctgagccaaatggagtaaattctgtggaaatgatggataaagaaagaaacaaagacaaaatgcctgaggatgttacattcagccctcaagatgaaacacagaccgcaaatcataaaccagaagagcatcctgaagaa

SEQ ID NO: 36967 - DNA, 395 bp, Homo sapiens
gaggcgctagcttctctaagccatccagtgccatcctcgtcgctgaaacgacacacgctctcgccgccgccatgactgagcagatgacccttcgtggcaccctcaacggccacaacggctgggtaacccagatcgctactaccccgcagaacccggacatgatactgtccgcctctcgagataagaccatcatcatgtggaaactgaccagggatgagaccaactatggaattccacagcgtgctctgcggggtcactcccactttgttagcgatgagggtatctcctcagatggccaggttgccctctcaggctcctgggatggaaccctgcgcctctgggatctcacaacggtcaccaccacgaggcgatttgtgggccataccaaggatgtg

SEQ ID NO: 36968 - DNA, 462 bp, Homo sapiens
  misc_feature (1)...(462): n = A,T,C or G
nattgatacgccctgcggnaccatcgacggaccctccgggncgacccacgcgtncggccagtagtaccatcacagcactgtcacctggaggtgctcttatgcagggaggaacacagcaagccataaaccagatggtgccaaatgatattcaatctgaattgaaacacttatatgtagctgttggagaacttctacgacatttctggtcctgctttcctgttaatacgccattcctagaagaaaaggtagtgaaaatgaaaagtaatttggaacgattccaagttacgaagctctgtccattccaagaaaagattcggagacagtatttaagcacaaatttggtaagtcacatagaagagatgctccagacagcctacaacaagctccacacatggcagtcacggcgtctgatgaagaaaacgtgaggtggccatgatgcttacaggttttgtgagattgagg

SEQ ID NO: 36969 - DNA, 400 bp, Homo sapiens
tgttttttcattgctcagtcctatgtgctggtgaagaagtggagcgaagcccttgtcctgtatgacagagtcctgaaatatgcaaatgaagtaaattctgatgctggcgccttcaagaacagcctaaaggacctgcctgatgtgcaagagctcatcactcaagtgcggtcagagaagtgctccctgcaggccgcagccatccttgatgcaaacgacgctcatcaaacagagacctcctcctcccaagtcaaggacaataagcctctggttgaacggtttgagacattctgcctggacccttcccttgtcaccaagcaagccaaccttgtgcacttcccaccaggcttccagcccattccctgcaagcctttgttctttgacctggccctcaaccatgtgg

SEQ ID NO: 36970 - DNA, 362 bp, Homo sapiens
caattaaacttaagggcgggccttattctgatttgagtattttaatgtctcactgggctgaattggtagttggaaaaattattcttctggaggtctgttaaactacatcctacactgacttcaaaaaacagtctgtcagacaaaaaggccttatgtcaccactgggacctcagtttcctcatcccatttacagtttttctaactccagggtagtgtttagtgttaatatttgggatatattttttttcaaaactgtttttaagtagtttgtaatttgtaacaaacttgtaacctggctgggactgacattgtcatagctatgatcaactttggatattagcagaaaaaaaaacaaaaaaaag

SEQ ID NO: 36971 - DNA, 427 bp, Homo sapiens
  misc_feature (1)...(427): n = A,T,C or G
gcggngaaagatgataaaggaaaaaggaaacgaaaaagttctacatctggctcagattttgatactaaaaagggcaaatcagctaagagctctataatttctaaaaagaaacgacaaacccagtctgagtcttctaattatgactcagaattagaaaaagagataaagagcatgagtaaaattggtgctgccagaaccaccaaaaaaagaattccaaatacaaaagattttgactcttctgaagatgagaaacacagcaaaaaaggaatggataatcaagggcacaaaaatttgaagacctcacaagaaggatcatctgatgatgctgaaagaaaacaagagagagagactttctcttcagcagaaggcacagttgataaagacacgaccatcatggaattaagagatcgacttcctaagaagcagg

SEQ ID NO: 36972 - DNA, 468 bp, Homo sapiens
attgaacgcctgcaggacatggacacccctgccgtaccgacccacgcgtccggtttttaaaaaaggcatttgaatgaatgtttgactcacgtttgttaaattaaccttcagtaactgcagtaccaaaaattacactcaactgatgaaaaaaacgaattgtatgatttaggaatcaaaaactaaaataagtggaattatgtatcttttctaaagttaaaaaagtaaaatattttattatgagttattataaaaattggttaattgtataggaagatgacagtatttttttcaagttatcataaaaagtaattcagatgacatttgagaagtaggggaaagggaatcatgttgacagttttagttctgtgaacactaatttgtgtgaagctattaaaatgattgtaaagttgactactgtaaatttcccataattatgtgtgtatatgtgtcatatgtatgtacatgtat

SEQ ID NO: 36973 - DNA, 383 bp, Homo sapiens
  misc_feature (1)...(383): n = A,T,C or G
tatgcagtcccccaggatacagggtcaaaggagagctcttccatcgcagttggaagcccatggggcagggcccaggacacagtgagcatacaatagacattagctgctgtggtgtcttgatttcaagcccagtgcagatgcatctgacttacgaaacttcagtgacacctgctctgtgccagacactgaagatggagcagtgaacagcactgacccagcctgtcctcctgttgcctgcaggccagaagcaaggtctcgctgtgttaccctggctggagtgcagtggctacttacaggcatgatcatagcatactgcagcctcgaactcctggactagagcagttctcctgcctcagcctccagagcagctgggactgcagacn

SEQ ID NO: 36974 - DNA, 418 bp, Homo sapiens
  misc_feature (1)...(418): n = A,T,C or G
aggatttggtcaggcactangagtggagcatgagctctggggacagacagttatgggttctggtcccactggttatcacttactagttgtttgaccttgggcaagtcatttgaccttctgtgcctcagtttcctcatctgtaaaatggggctaacaatattacctacctcataggatttaatgatgtcaagctcctcactggaggccttatcccttcgtggagcccactaggtgccgacccctcagaatataaccctcatgcctggacccctgagagcttctgatcccagctattagggacagaagaagcctccaaatctggaaggtgctgaatgccctgctgactgggaaagtttcagggcactgatggggtctacctggtaagcggagggcctgaggaaacctgtagcttcaatcn

SEQ ID NO: 36975 - DNA, 419 bp, Homo sapiens
cccacgcgtccgcccacgcgtacgccgcgctggtgaacaggacccgtcgccatgggccgtgtgatccgtggacagaggaagggcgccgggtctgtgttccgcgcgcacgtgaagcaccgtaaaggcgctgcgcgcctgcgcgccgtggatttcgctgagcggcacggctacatcaagggcatcgtcaaggacatcatccacgacccgggccgcggcgcgcccctcgccaaggtggtcttccgggatccgtatcggtttaagaagcggacggagctgttcattgccgccgagggcattcacacgggccagtttgtgtattgcggcaagaaggcccagctcaacattggcaatgtgctccctgtgggcaccatgcctgagggtacaatcgtgtgctgcctggaggagaagcctggagaccg

SEQ ID NO: 36976 - DNA, 488 bp, Homo sapiens
  misc_feature (1)...(488): n = A,T,C or G
acggccactgtcactgacggcntgcgcacggaaccccgggtcgacccacgcgtccgattgccttcatcaatgtgtctgttttttaattcctcctttttcccttgaaaggacataataattttcaaactatgcagatttctctttcataagaaagagtttttaagaaaattctagaatttaatatttcagtttccaagatttgagaattttacatctaattgttacttctaactcatttttaaagttcctaagtatccattttattatgaactcataaatgtaataaattgtgcaccttctannnaaaaaaaaaaaaaaaagaaaaaaaaatataaanggggggggggccctttaaaagaatcctagggggggccaatttttcgggggggaggagaagaaaatttttttcttttatggggggcttaataaaaccccctgggggcctttttggaaagaacccttttttgggggggggaataaaggaacag

SEQ ID NO: 36977 - DNA, 413 bp, Homo sapiens
cggacgcgtggggcagaaggtgcaagccagagctcaggcagaacttccagagtgcatctgggatctgcatttgccactggttgcagatcaggcggacgaggagccgggaaggcagagccatgtggctgccccctgctctgctccttctcagcctctcaggctgtttctccatccaaggcccagagtctgtgagagccccagagcaggggtccctgacggttcaatgccactataagcaaggatgggagacctacattaagtggtggtgccgaggggtgcgctgggatacatgcaagatcctcattgaaaccagagggtcggagcaaggagagaagagtgaccgtgtgtccatcaaggacaatcagaaagaccgcacgttcactgtgaccatggaggggctcaagcgagatgaa

SEQ ID NO: 36978 - DNA, 426 bp, Homo sapiens
  misc_feature (1)...(426): n = A,T,C or G
aacaaaccttccagtggctgggctccgcccttctccttggtcagagccctccaggctcctaagggcgaagccgacacctcatccctttggaacttgaagttctcagtccaagacctccgtggagagtgaaagactcaatgcctcctgaccgaggcttcaggcctgccccggcagctaggaaacctgaaactgccattgagcagaaggaaaacatccctttccagaacctttctcgtttttctaaaaatctgcacttttggaagtgatcccccaaagagacctccagactctaccatgagtgtctccagctgaactcatcgngtctaatcctcaccctagcttatcctgttcaaatcatttccatctttttctggatgaacctgggcggatgtcagaccagagaagagcacagaatgtaccagagag

SEQ ID NO: 36979 - DNA, 436 bp, Homo sapiens
agtgcactattgtactgtttgcgctttgtatgtgtttggttagttttgcaagaacatgctggtgaaggagagagaaccccaaacaattgattagcagtgctactgaaactcagatatacacaggaatgacaaagaaacatctatgaaaaaaagcagactctggaactccatctccctgagattgtcactcatggggtctgcaggaagtttcaggaatctgcattttcttctaataaacgtggtccacaggttataagttgagatacaatagaatatataaagtaaaaaaggaaaatttgaagtttcctgcctagcccaactcttctcctcattggtagtggctgttaaattggaaacatatctctttccagacatattaataccttttatacagttgactcttgaacaacattagtttgaactgcgtgagtacact

SEQ ID NO: 36980 - DNA, 457 bp, Homo sapiens
  misc_feature (1)...(457): n = A,T,C or G
ctttctgtcttcctcttctcaccctcctccctccccttagccatcacttctgggaagtaaagaacttgacttagtgccggaaaaaaaaaaaaaaaaaaaaaaaaaaaaaaaaaaaaaaaaaaaaaaaaaaaaaaaaaaaaaaaaaaaaaataaaaaaaaaaaaaaaaaaaaaacacctaactacaaaataaacaacacttttgggaaggaaagaacttgacttaatgccggaaaaaaaaaaaaaggaaacttatgtgtgggtggattttgtttgggtcaagggtgtagggaaaaaaaaaacttgaaattaaaaaaaaaaaaaaaaaaaaatttgttggctgtgtgaagttggggccttctgtggtaaagttaaggagtggggnngngnnnannnnnncncnnnnnnnnnnnnnnnnnnnnnnncaacaaactcctaccgcggggggtaaagacttag

SEQ ID NO: 36981 - DNA, 402 bp, Homo sapiens
aacctactaatgagtcataacctgcagtttaaaaaaacactgccacagaagattaaagaaaattatgattgctctaagaaattaacatttctaatcaccatcatgaacattatctatgcagcagttgatgctaatgggaatttatgccattaaaagattatgatgtgtcaactctattttgcgaaggctttgaaatgctctcagatgctgacccatttgatttgtaaaggctatcaagcacagtacttttgctggcttcttcggaggccaagagcctacttatattggtttcaaactcttaagtttattaaattattcttcctactttttttgaattatgcgtgggcatgtaacatggtttaacaccaaattgttacatttagtttgcaattatctaatgca

SEQ ID NO: 36982 - DNA, 437 bp, Homo sapiens
gttattactgatcgcattgaaaacattgatcacctgggtttctttatttatcgactgtgtcatgacaaggaaacttacaaactgcaacgcagagaaactattaaaggtattcagaaacgtgaagccagcaattgtttcgcaattcggcattttgaaaacaaatttgccgtggaaactttaatttgttcttgaacagtcaagaaaaacattattgaggaaaattaatatcacagcataaccccaccctttacattttgtgcagtgattattttttaaagtcttctttcatgtaagtagcaaacagggctttactatcttttcatctcattaattcaattaaaaccattaccttaaaatttttttctttcgaagtgtggtgtcttttatatttgaattagtaactgtatgaagtcatagataatagtacatgtcacctt

SEQ ID NO: 36983 - DNA, 436 bp, Homo sapiens
cccacgcgtccgtttgaaaatttacttagataatgaaacctcgttttaattgtgctttttgtgaatccaacacttgtttgcttagaaagtatcttatccagtattaatattttgttcttttgggttttaaagttgagcttattcagcctcaatcacattacagcaagcataaagtaacagttgactcaatgaaagacccaaattgcctgtacagataaaattcactgaatcaaaggcacaatagctatcttttcacttgagctcagaaaagtaagatggcttaatttgaactattaattttcagtggcctctaattaaacaaaaacaaaaaaccacaaatactggctaggtaagatattcctgaggtcattttaaaagaagtgtggcacctaggattcaatatttaatgctaacagtattatattttagtgaaatg

SEQ ID NO: 36984 - DNA, 380 bp, Homo sapiens
  misc_feature (1)...(380): n = A,T,C or G
ggttaggtacagctatcctaatggagaagagtgttctttatgcgttaattcatgcaaagcgcttagaacactggctcattataggtgcataacacatcttatagttgtttaataatatataagaaccaggaggaaaaagaattttgaactgatgggggaaaggaaggagaacataggaaatgataggattaggacttgggcatttatattaatacaaaatggggtagacggcctgaatatcactgtagtatgatcatacgggggaaagtgggatggaaaatacgcttaaaaatgttaatttttaaaactttaggaagctttatttatattttttaagattttctgaacatagcatgaaggagtgagattcatgtttctgn

SEQ ID NO: 36985 - DNA, 473 bp, Homo sapiens
accttcactaatactagattctgttgcttttgtgtacaagatatagatctagattttcacatataaggattccttaaagcaaggaacatcatagtacaataaaaataagacaaaatctcgttcaaggagctgtctgtattcaacaccctgaaagttctgagctacatcaacagctggaacagtacagaaacactatctctcagggaggacagagtaccaggttttggaatcattttcaaataaaactccccctcacaccacccaactggaagtcattcctgatgtgctgtgagcagaatgggcctgcgattttgcaagaatgcaaaaccacatgaaaatttcaagaattcactgatctgatgcaaaataaaaatttatcattacatcttgaacccaggaagcttacagcaaagagactatgctttatgacgtcagcaatagataattccacgttgcctttgtgattagtatat

SEQ ID NO: 36986 - DNA, 422 bp, Homo sapiens
cacggacagacttgcgcgcgtccaatgtgtattcctccatcatatgctgaccttggcaaagctgccagagatattttcaacaaaggatttggttttgggttggtgaaactggatgtgaaaacaaagtcttgcagtggcgtggaattttcaacgtccggttcatctaatacagacactggtaaagttactgggaccttggagaccaaatacaagtggagtgagtatggtctgactttcacagaaaagtggaacactgataacactctgggaacagaaatcgcaattgaagaccagatttgtcaaggtttgaaactgacatttgatactaccttctcaccaaacacaggaaagaaaagtggtaaaatcaagtcttcttacaagagggagtgtataaaccttggttgtgatgttgactttgattt

SEQ ID NO: 36987 - DNA, 507 bp, Homo sapiens
  misc_feature (1)...(507): n = A,T,C or G
tggttgccgganaanagaaatcgctcgatcttgnatcntgacgccatcggaanngcccaagcgtncgaccgtgcccagccaaatgtttattttatttaaatttatttttcttaattatttgttgtacataatatgagtatatattcatgcaatatatggcatattttgatacaagaatacagtatataattatcacataagggtaaatgaggtatccatcacctctagtatttatcctttgtattacaagcaacccagttttatacttttagttattttaaaatgtaaaattaaattgttattgattacagggttatttttatggtcataataaaagttatgtagaagtataataaaatccctacatttctgaggcctgaataagtatttttaaagttttctaatatttattttttgagcatgtttcctgtctgcctgcaaacacatgcagacatttatgtttgatttacatatagctaaatatatgttagtctaaagataaacctt

SEQ ID NO: 36988 - DNA, 469 bp, Homo sapiens
  misc_feature (1)...(469): n = A,T,C or G
ttcggcggttctattttgaatgtccaaggcttttaaatattttttttttttgaaacaaagttttgctctgttgcccaggatggagtgccatggggcaatctcggttcactgaaatctccgcctcctgagttcaagcaattttcctgcctcggcctcccaaagtgctggaattacaggcatgagccaccgtgcccggcctacaatactttttaatggttataagaagcattaaattgcccatatgtgtatggaggcatattgttggtggaagttttaaaataatggtttttactataaaaaggctgagaaaaatatctgtactttatcatataaaataaaggcgacggggctccatggctcatgcttgtaatcccaccactataggtgggattccaccactgaggtgggaggatcatttgagcttaggagttcgagaccaccttgcacccttctctaacttaaaagtacn

SEQ ID NO: 36989 - DNA, 404 bp, Homo sapiens
ccctaactcagtgtggacagaagcagttccatctgcaggattagagagttatctcccctctgctcctccagtgtcaccagaaggatcaggaaggcttccctgtccagtgtctcctctgcacatctgcctggatttgactggtttgccctttccttggaaagcagatctcttgggcacaagacacatcctagagcagggcatcggcaagcttttccttaaagggccagagagtcaatattttagactttgcaagcctatacctcctcacctcggctgaaagcagccatggacaatctgtaaacaaatggttgtggctgtgttccaataaaactttatttatggacactgaaatttgaaaaaaaaaaaaaaaaaaaaaaaaaggggcgcccctttaaaagaacccc

SEQ ID NO: 36990 - DNA, 540 bp, Homo sapiens
  misc_feature (1)...(540): n = A,T,C or G
acatgtaataattcacgtctcaataatctagcgtaatacttcattagtatttctcaaccaatttcctcttatcttcgaacccgcggnnggggnnnnnaatgatagcttgagacatgcgccgaaccccgggacgacccacgcgaccgggtgctagactcaaactttgttttcagtggcaccctacaaacttctttcttgattctctctgccaccccacccacacgtcccagcatgtctcattgtttttactggcacagatgtaatcgggcctgaagttcactgaatcagaaatcaaaagacaaaagagaagacaatgacagattgcactctgcagaggaaatgagctctctggccaaggtgccgccttgctcttccctaatgcacccatctgaggtcacccagccagtcctggtctctgcactcttaaggtgctctcaaagccaaagagtggccttccctctggaggaggtgtcaggtttgtctcctgtgtttgagtgggtatgtggnggatgagcaagtgggtgtaagaatatgtgggtt

SEQ ID NO: 36991 - DNA, 413 bp, Homo sapiens
aactacatgctctcgagaaacgtggacaacgccgagggctccgacactgactactgaccgtgcgggtgctctcaccctcccttctctccctcaataatgctcacttctgatttgatgttgatatacttttatggtaactacatagatgttataagaacataaaccaacattataaacaatggccacatttagttactctaaatgtaacaaagaaattagatgtttttatttttctgtgattgtacaaaaacaacaaaaacgaagtgctctcagtcaggtttttccctccatatttttggtcacttttgataagtttgcatgaaaccattttggtgcatttttagttgggaatggtacatttttgtaaatccacccagtgaacatgaaattgtacattgtgtataattgatcat

SEQ ID NO: 36992 - DNA, 388 bp, Homo sapiens
  misc_feature (1)...(388): n = A,T,C or G
caacatgcctacaaagttgcagaagttggacctgagtagttatccagaagcgacagaaaaaaacgtagaaaggattttgggattgttgcaaacctactttcgaaagtatcctgatactcctgtgtcctattttgagtttgtgattgatccaaactctttttctcgtactgtggagaatatattttatgtttcttttattgtaagagatggttttgcaagaataaggcttgatgaagacaggctgccaatattagagccgatgaatgttaaccaaatgggtgagggaaatgattccagttgccatggcaggaaacagggagttatatctttgactttacaggagtggaaaaacattgtggcagctttttgaatttctgaggctatgatn

SEQ ID NO: 36993 - DNA, 424 bp, Homo sapiens
agagccatatattgcatgggggtaccccaatctgaagtcagtaaatgaactaatctacaagcgtggttatggcaaaatcaataagaagcgaattgctttgacagataacgctttgattgctcgatctcttggtaaatacggcatcatctgcatggaggatttgattcatgagatctatactgttggaaaacgcttcaaagaggcaaataacttcctgtggcccttcaaattgtcttctccacgaggtggaatgaagaaaaagaccacccattttgtagaaggtggagatgctggcaacagggaggaccagatcaacaggcttattagaagaatgaactaaggtgtctaccatgattatttttctaagctggttggttaataaacagtacctgctctcaaaaaaaaaaaaaaaaaaaaaatgggg

SEQ ID NO: 36994 - DNA, 177 bp, Homo sapiens
atttatgttccagacaaaaataacacaaataataatatccttcgttataaccacaatgagataagtattggcattagtgttcagtgccattttatactttctctctgtgttctctgtattgtactaaccaacctcccaaatcgctgagctgcttgtttaaaaaaaaaaaaaaggggg

SEQ ID NO: 36995 - DNA, 383 bp, Homo sapiens
  misc_feature (1)...(383): n = A,T,C or G
cccaaggccaaggaccccttcgctcacctgcccaagagtacctttgtgttggatgaatttaagcgcaagtactccaatgaggacacactctctgtggcactgccatatttctgggagcactttgataaggacggctggtccctgtggtactcagagtatcgcttccctgaagaactcactcagaccttcatgagctgcaatctcatcactggaatgttccagcgactggacaagctgaggaagaatgccttcgccagtgtcatcctttttggaaccaacaatagcagctccatttctggagtctgggtcttccgaggccaggagcttgcctttccgctgagtccagattggcaggtggactacgagtcatacacatggcggan

SEQ ID NO: 36996 - DNA, 424 bp, Homo sapiens
taaggcttcgtgcatagtgtcttcatgtcgcgtattgttgagcgcgttcttagcagttggcttcatggacaactcattagtgttttgacttttcttacccagcgttaattgaattcttgcttttagacaacttcctttttgtagtggtgaaccttgccctttagtacagttcaagtgaatctggataattgttcatctttgctttagcttacataccatgtagtggtctgtggctacaggaagctggttctgtctgcttccacagtctgcttaaaaaactgtctgacttcgtgaatatagagaccaagtttaccacttctgatgaagagaccaattaagattcattcctcattctgtttctttccagagggagaagagtccccatgaaataagatgaaactgattccatgcactagtacatgtg

SEQ ID NO: 36997 - DNA, 430 bp, Homo sapiens
  misc_feature (1)...(430): n = A,T,C or G
agaggttataatctgaatcccaaaggagactgcagctgatgaaagtgcttccaaactgaaaattggacgtgcctttacgatggtaagcgttaacagctcccactgcttctataatgactcctttaagtacactttgtatgggtgcatgttcagcatggtgtttgtgcttgggttaatatccaattgtgttgccatatacattttcatctgcgtcctcaaagtccgaaatgaaactacaacttacatgattaacttggcaatgtcagacttgctttttgtttttactttacccttcaggattttttacttcacaacacggaattggccatttggagatttactttgtaagatttctgtgatgctgttttataccaacatgtacggaagcattctgttcttaacctgtattagtgtagatcgatttctggcn

SEQ ID NO: 36998 - DNA, 400 bp, Homo sapiens
attttatgtcccccatgttcatttaaacaatttatagtgtttattatttgtctgattttggaaagaatacatatttactatagaaaacttttaaatgtagtaaaaaagaagaaaaagcctgctgaaattccctcactcggaagtacttattgtaaacagtctcttttgtgtatgtttgtttgtgtgtattactaaattgtatgtattttgtatatttaattttatatcctcttttattcactcaaaattatacctttagaattttctcatataattaaataacttttaatttataaacttgtgaaaaaatagctttataattttttattttggaaaaataattatttattgtccaagtattaccataaaaatacttaaaaaaaaaagattatgctgctga

SEQ ID NO: 36999 - DNA, 404 bp, Homo sapiens
ctcttctaattatggggagctttgtcccctggctctattattccttctactgctccccacagccacgggtcatctacctctccatcgtctgtgtcctgggcatttctgccatcattgtggcgcagtgggaccggtttgccactcctaagcaccggcagacaagagcaggcgtgttcctgggacttggcttgagtggcgtcgtgcccaccatgcactttactatcgctgagggctttgtcaaggccaccacagtgggccagatgggctggttcttcctcatggctgtgatgtacatcactggagctggcctttatgctgctcgaattcctgagcgcttctttcctggaaaatttgacatatggttccagtctcatcagattttccatgtcctggtggtggcagca

SEQ ID NO: 37000 - DNA, 407 bp, Homo sapiens
tatgcttttttgatactgattttgagaatttaaagcagattaccttttaaaactggaccaactaagtaattggtatttaatcaaagagaaaatggtaataaacttttcaaaatctttgttaaaccaaacattcaacacaaaataaactagaaggccagaggataatggaataaaagatcattgcaattacttatccttcctaaaaatatagttttatattaattgtgcttatggaagaaacaatgtcagccaagtccattttatagtttgagtgcaattctttgaacaatagaaatatctgcagtctttcacagatttgtattatgctgaagagtttcatctgacaatctgcttcaagaaatctcagaaaatatgataacattttaactttcattttagagcacgtg

SEQ ID NO: 37001 - DNA, 407 bp, Homo sapiens
cactggcggccacggagcagagtccctcacccccaccagctgtagctgaacgtctggatggtggagaagagcagggttccgagtctgaggaagacataaccttgtgcctgcctgcccacctctctctctggtcctgttcatctctcaggctctgagacactgaccttcactgctcagttaaaggttccagggattccactttgtctggacccatccagctgagtgaacccagggtggtggtgtatctggggagagtgaggagtgggttgtccaaacaccagggaaagagccctttggggcctcagacagaggagtgaagctggaaccatcagggaacatgagtgaattttggcacaaactgggctgctgtgtggtagagaaaccccagccggtgagtctccccacct

SEQ ID NO: 37002 - DNA, 420 bp, Homo sapiens
  misc_feature (1)...(420): n = A,T,C or G
ctcggatagngggaagtctacaccctccaacaatgtttatgaattgctcaagcacggacatcagtgaggactgggagaaagactttgacttggacatgactgaagaggaggtgcagatggcactttccaaagtggatgcctccggggagctggaagatgtagagtgggaggactgggagtgagggagccagagggagcagctcccccacccatggcatctctcgcctccctcgctcgtctcagcccagccctggaagactgagaatgttcccccaaatctcctctgccaaccagagctctgggcacagattctggtggctccctgctggccctcttgggcctctgctcacacctgggaaggggctctctaaatcccggccagaaactctgacttgtgccaacaataggatgacccaaggg

SEQ ID NO: 37003 - DNA, 416 bp, Homo sapiens
cccacgcgtccgcccacgcgtccgggcggcggcagggctgagccagcgacgccctccattcactctccgcgcccgttctccggctgtcctcccgttccgctgcccgccctgccaccatgacggaacaggccatctccttcgccaaagacttcttggccggaggcatcgccgccgccatctccaagacggccgtggctccgatcgagcgggtcaagctgctgctgcaggtccagcacgccagcaagcagatcgccgccgacaagcggtacaagggcatcgtggactgcattgtccgcatccccaaggagcagggcgtgctgtccttctggaggggcaaccttgccaacgtcattcgctacttccccactcaagccctcaacttcgccttcaaggataagtacaagcagatcttcctg

SEQ ID NO: 37004 - DNA, 425 bp, Homo sapiens
  misc_feature (1)...(425): n = A,T,C or G
ctgaccagcaccatggcggttggcaataacaagcgccttacgaaaggcggcaaaaagggagccaagaagaaagtggttgatccattttctaagaaagattggtatgatgtgaaagcacctgctatgttcaatataagaaatattggaaagacgctcgtcaccaggacccaaggaaccaaaattgcatctgatggtctcaagggtcgtgtgtttgaagtgagtcttgctgatttgcagaatgatgaagttgcatttagaaaattcaagctgattactgaagatgttcagggtaaaaactgcctgactaacttccatggcatggatcttacccgtgacaaaatgtgttccatggtcaaaaaatggcagacaatgattgaagctcacgttgatgtcaagactaccgatggttacttgcttcgtctgtn

SEQ ID NO: 37005 - DNA, 412 bp, Homo sapiens
ttaattggaatgcctacgccaccaccatcaaaccatttccagtacagaaaaacactttcaggggatttatttccagggatgggttcaacttcacagaactttttgaaaatgcaggaaaccttacagtctgtcaaaaggagctttgctgtcatttaagctacagaatgttacaaaaagaagagaatgaagtatacgttctaggagcttttacaggattacatggccgaaggagaagagagtactggcaggtctgcacaatgctgaagtgcaaaactactaatttgacaacttgtggacggccagtagaaactgcttctacaagatttgaaatgttctccctcagtggcacatttggaacagagtatgtttttcctgaagtgctacttaccgaaattcatctgtcacctggaaa

SEQ ID NO: 37006 - DNA, 392 bp, Homo sapiens
cgaacttttactttctctaacttagtacttcatcaatttttgacttgtattaccatttgtacctccttgtacttgtgtacaacccctagtaagatctttggtgctagaattcacagtttaactcatagtatccgtttgctcgttctgtgtgccagtggtaggatcaacctttggggcatttgctttgtcatatgagcagataacttaccgtccctctgtctcagctcctccattggtaaatggtgaagtgaaaatctaccctgatccttctttccagttttttggtaaggatcaatttgtgttgcctctggaggtttgtagtacatggaaatcaataattagcatgtattttatgaactgcatacagaaattcattgatttagtgcaaagtg

SEQ ID NO: 37007 - DNA, 409 bp, Homo sapiens
  misc_feature (1)...(409): n = A,T,C or G
nctggtggaggataatttggggtattctattcttaacttctttttggtccttatcttctggttcccccctacattacagggtatatctaattgcttttctccccccgggttttcttttcagctctttgccttcccacctaaacatcagttatgaggactttttctctgcccttcgtcaatatgcagcctgtgaacagcgtctgggaaagtagtggtcattggttgcataatttgatttgaggcttgtggaggaaaggaaccaagtgactctgatgtttacaaagcacctatgaaaccctgtacacacctagttcataatcctcataatttatcaacaaacacaaaaaagtgtcttacttgagagtgagtgtgtgtgtgtgcgtgtgcacgtgcacacatgtgcacgttt

SEQ ID NO: 37008 - DNA, 438 bp, Homo sapiens
  misc_feature (1)...(438): n = A,T,C or G
cccacgcgtccgcggacgcgtgggccgagctcctgtggaagttgctccttgcgctgatgtggtcactcggctagcaggcccttctgtggtcaaccacatgatgcctgctagttatgatggacaggatccagaatttctgatgatttgggttcttttccatagtccaaagaaacagatcagctcttcagatattctggactcagcagaagaattctcggcaaaagttgatatcgaagttgacagcccaaaccctacgcccgttcttagaagtgtgagtctccgagcaagagcaggaatagctaggatccatgctcccagggacttgcagacgatgcatttcttggccaaagtggcttcctcaagaaagcagcacttacctttgaaaaatgctgggaacattgaagtttatttggatatcaagggcccagaacaaggaan

SEQ ID NO: 37009 - DNA, 417 bp, Homo sapiens
aaggccgataaatctctttcttataactcaaggttctggaagaaccttctttacttaatgcctgcaaaaacagtcaagccaggtagagacgaaccggaagtcttgcctgttctttccgagtcttaatcttcagaaacagtgaacgccaaaaagaactcaagatattctggggactgagcatatgaacctgttcataacaaaggctgtgactcgaaataattaactttgtcaaaatcctgctcacaatttgaagatgaaacttgtcattaggttggcgggaatgagactaaagattgcgctgtgggctgtggtcacgtgctcccagaagacctggaattcaaaagaaatggagctattctttttctccctctttcataactggatgcagctgctcatactcaatcccatattcagcag

SEQ ID NO: 37010 - DNA, 395 bp, Homo sapiens
acgcaaagctgagaacatggacgttaatatcgccccactccgcgcctgggacgatttcttcccgggttccgatcgctttgcccggccggacttcagggacatttccaaatggaacaaccgcgtagtgagcaacctgctctattaccagaccaactacctggtggtggctgccatgatgatttccattgtgggatagaaccatgtagctgctgaaggaatgagcccatgatttctcagctgaagtaactcctcaccatgtggcctgatcatttggcctatggagatgttgcaggagggtggaattgacagctgccactttatgctttcagttactcaagatggtttctgagtcccttcaacatgatcctgggaggaatcgtggtggtgctggtgtt

SEQ ID NO: 37011 - DNA, 441 bp, Homo sapiens
caaagacacacgtgacccaccaccccatctctgaccatgatgccaccctgaggtgctgggccctgggcttctaccctgcggagatcacactgacctggcagcgggatggcgaggaccaaactcaggacactgagcttgcggagaccagaccagcaggagatagaaccttccacaagtgggcagctgcgggggtgccttctggagaagagcagagatacacatgccatgtacagcatgaggggctgccgaagcccctcaccctgagatgggagccatcttcccagtccaccatccccatcgtgggcattgttgctggcctggctgtcctagcagttgtgggcatcggagctgaggtcgctactgtgatgtgtaagaggaagagctcatgtggagaaggagggagctactctcacgctgcgtgcagcgacagtgcacatggct

SEQ ID NO: 37012 - DNA, 396 bp, Homo sapiens
ctctaatggacctttttgaagagaagttgtggcttatgtggagtttacatgggcctctgatggaagaaagctaatctgtttagtatttgtgcattttactaaaatggcagcttaaagttgtgtatctgctattgtgatgccaatgccggtgttttaagtggaaaaaaaatgacctctttgatttgtgctgtgtacacaagatttctggaaaagtaaagaaaaaccctttttatggctcacacagcttaagagtagctgtctctcaaacgtgcgctcacagttgagctgcttttgttttattctaaataaattgtttcttttgaggaaaaaaaaaaaaaaggggcggcctttttaaagaatccttggaggggcctaatttaacgcgtgcttgaaaag

SEQ ID NO: 37013 - DNA, 430 bp, Homo sapiens
  misc_feature (1)...(430): n = A,T,C or G
ctctgttctcctaacattaccattgtgtttgaaaatactttaagtttcacaagtattttataaaaagtgagggttatagtagggagtagttctattagaacaactagttaagctcagtaattcccactccttttgagggccctcagtattattaagaaagtaatttacaaattataacataggaattattttgaatgaaaatttctatataagtatggtttgaagtagaatcaggttagcctcatttaaaaatgaagagaggctggacatgatagtttatgcctgtaatcccaaagctttgcgaggccgaggcggggggaccacctgagctcaggagctgaaggccattctgagcaacatgtcgaaaccccatctacacaaaaaacacaaaaattatccgggcgtggtggcgcatgcccgcggtcccagn

SEQ ID NO: 37014 - DNA, 407 bp, Homo sapiens
actcattctgtcaccagtagaattcagcagttaatatattccatattatttctttgaatcaattcattttcagagcactttaaagtctgatatttctcgatgtgcactgtgatgcctggaaccttcctctggaagtgctgattttatggactgaggactggtgactggtctgtgatagaagcaaattccaattccaaatgtaattagacaaaaatcatttttttagaatgtgtttttattgtaaaagtatctttttcagcttcctgttctattgtcttttttcagatacaacatttttgtctatggtgaactgctgtaaatgacgcaaagaaatgcctaaaaaggacaggtggtttgactcatggatgatgatgatgtcactgtgccacttggacagggcgttttct

SEQ ID NO: 37015 - DNA, 483 bp, Homo sapiens
  misc_feature (1)...(483): n = A,T,C or G
cgtgcactgagacttgggacntgccagganccccgggncgacccacgcgtccggagctgtgttgactaccactacttttcccttcgtctcaattatgtcttggaagaagtctttgcggatccgcggagaccttcgggtagcaactgtcaccttgatgctggcgatcctgagctcctcactggctgagggcagagactctcccgaggatttcgtgtaccagtttaagggcctgtgctacttcaccaacgggacggagcgcgtgcggggtgtgaccagacacatctataaccgagaggagtacgtgcgcttcgacagcgacgtgggggtgtatcgggcggtgacgccgcangggcggcctgacgccgagtactggaacagccagaaggaagtcctggagggggcccgggcgtcgggggacagagtgtgcagacacaactacgaggtggcgtaccgctggatcctgcagaagagaagtgagcccan

SEQ ID NO: 37016 - DNA, 382 bp, Homo sapiens
taggttagaatcaatgaggctgcacaggtgagtttgggtcacgcccatggaggttatggaatataggtgtacctttcttctattgttaagtgaataaaatctcattaatacaaatggtaaggtaatctttatgggaagagaactttgaaaagggcaacctcagcattgtgtagaagagaagaggctcagtctcacacagttgcctcatctatggtcagaagtagacagcatagagaatctgtcatgggataattatctatatggaaacatcaagtctttttacactagccggcagatgcctccttaagtcacagaagtgcaacatatgtaactctggcatgctaaagctggctccacaacacacagagagatcttctctagt

SEQ ID NO: 37017 - DNA, 401 bp, Homo sapiens
cccacgcgtccgtgcatctttcttttgtcataaaattggaattacaattttcaactgggaaacagaaacacatttcttagcgtgctcagattttatatatcaccttatcaattttttccaaaacatgatttaaagcaacatctgtcctagtataattgttgcattttaaataacaatttattgaaaaatgttaagttttaccagcctaaaaaaagtaacaaaccaattaagtgtactttgggggcagggaggagtccttgatttgaataatcaggagttttgttggtccagtttcgccttctgagcagttcttctgtatcccgggaaaagtacgctcggccccaaactggtatttgtcagacgatacatgtaaaagtttgtccttgaacgtggaacaagac

SEQ ID NO: 37018 - DNA, 487 bp, Homo sapiens
  misc_feature (1)...(487): n = A,T,C or G
cattgaacgccntgcgtagaaggccctgaanacccgggncgacccacgcgtccggggccatggatctcacacagctacagaaggagaaacatgacttggagcagcaacttctggagaaaaataagaccataaagcagatgcagcagcggatgctggagctccggaagactctgcagaaggagctgaaaatcagacccgataatgagctcttcgaagtccgggagaaacctggacctgagatggcaaacatggcgccttccgtcacgaataacactgacctgacagatgcccgcgagatcaactttgagtaccttaaacatgtggttttaaaattcatgtcttgtcgcgaatccgaggcttttcatcttataaaagctgtgtcagtgttgctgaacttttcccaagaggaggagaacatgctcaaggaaactctggaatataagatgtcatggtttgggtccaaaccagcttccaagggcagcattcg

SEQ ID NO: 37019 - DNA, 410 bp, Homo sapiens
agcatttccttagttctcagactctcctccgcctctaccaatagcttcgccagtgtcactgaatcaacagatccaagggaatgaacaagaagactaccttgagctcacagagggactgtcatctaaaccaggggaaccactgaactaaagcccaatttgcttgcattttctgatgacttttataagtttcaaatactcagacttgtggaattttataatttcatatcagctgatgagggtgccaggccataaaacaacggagagctgtacttgcttgtcacttggaggaaccacatccttgagacagcctgctgtcttgtatgtcttcagtaggaaacttctgacacacacattcaagggagttcctgcccctgagaagtgttcccatagctttccagtcgcaggttact

SEQ ID NO: 37020 - DNA, 420 bp, Homo sapiens
atttcttgttaccctcttttgtgcctttttattttgccaaccgtgtttatagaaaggacattactaatgacattttgcagattaaaaacattcatttgaacacagtagtcccctagaaaaacaactctacaaaaattttgcagccttattcattataattttaataaaattaacacaaaatcagtcaagaaggaaacatgtatattagtgaagtgtttttggagactgtttgaatgtgaccaaatgtggttctagttgacttcttttcactttggcttatatcaactcttgagagttaatgtgatcatgatattgcaaacaactataaatggtctctaggccttactttgtgattatacgttatctctggctagaaaaaaataatggtagtaaagaaactgacaaactgaaaataagaaa

SEQ ID NO: 37021 - DNA, 413 bp, Homo sapiens
  misc_feature (1)...(413): n = A,T,C or G
tcccagaggtgagtgcagcttgcctcctgtccccaaggggcttgttctgtcaggcctcctccagtcactgctggagtggggactctgactcctgtgttcacctcagagcccatgtacaggctagaggtgaggcttggcaacaacttctactaatacttagctttgtggcagagccagtctgaaggaggagaagcgctctcagccagcagggggagtgatgattatcatttcaggtagcaaggatatgtatttactatgtggggaaataatttgcaactttaatttgtttccaaagcattttgattggcttccttttcctttaaaccaaaaaattgtttaaatgtttaagggtcatgtggaacagctgagcttctggcaggaccacagaactgtcctctgagtctgagggctgn

SEQ ID NO: 37022 - DNA, 408 bp, Homo sapiens
  misc_feature (1)...(408): n = A,T,C or G
tcttcatcaaagattccaactcactggcttactacaacatggccaatggcgcagtcatccacctggccctcaaggagagaggcgggaggaagaagtagacaagaggaacctgctgtcaagtccctgccattttgcctctcctgtctcccaccccctgccccagacccaggagcccccctgaggctttgccttgcctgcatatttgtttcgctcttactcagtttgggaattcaaattgtcctgcagaggttcattcccctgaccctttccccacattggtaagagtagctgggttttctaagccactctctggaatctctttgtgttagggtctcgatttgaggacattcatttcttcagcagcccattagcaactgagagcccagggatgtcctacaggatagtttn

SEQ ID NO: 37023 - DNA, 382 bp, Homo sapiens
  misc_feature (1)...(382): n = A,T,C or G
cgggattataggtgtgaactactgtaactggcctagttgttgcttttggataaagagacaaaactttttaaccactttaaaagagagtaataagtaatgtaaattaaataaaattggctccagattacattgtatttccttcaccccacttattattttttttcattgtgtgagacaggatcttgttctttctcccatgatggaacgcaatttgtgcatgccccttctaatggcagtctcatcctcccaagccgaatcacgcctgtcacctcagcctccctattatctggcaccacatgcacacaccaccatgcctgtgtaattttttacttcatttttcagtagagacagagtctcactgcgttgactatgctgcttttan

SEQ ID NO: 37024 - DNA, 410 bp, Homo sapiens
cccacgcgtccggcaaggacagctttgcagttctcctggagttcgctgaggagcagctgcgagccgaccatgtcttcatttgcttccacaagaaccgcgaggacagagccgccttgctccgaaccttcagctttttgggctttgagattgtgagaccggggcatccccttgtccccaagagacccgacgcttgcttcatggcctacacgttcgagagagagtcttcgggagaggaggaggagtagggccgcctcggggctgggcatccggcccctggggccaccccttgtcagccgggtgggtaggaaccgtagactcgctcatctcgcctgggtttgtccgcatgttgtaatcgtgcaaataaacgctcactccgaattagcggtgtatttcttgaagtttaatattgg

SEQ ID NO: 37025 - DNA, 419 bp, Homo sapiens
ctgttctcgaactcctgacctcaagtgatctgcctgtcttggcctctcaaagtgctgggattgcaggcgtgagccactgcgcctggcctacaattagacttttttaataagtgaaaaagaaattaacagtatttgtaaatttaatagtaaatatgtataatcagagtttgaggtatttttcaatgaagacattttctttgcagaaagaaatttcagagcttccaagaccacaaacttaaaataagtaaagaagagagtaaaattcttaaaaaggctcagaaagatggatttttgcatgaaacgcttctggacaggtagctatttacttattttcactatttttcagtagccaatagaaatggcatgtagaaaagctatattctcttaaattactgtagttttcacatttttgtctttat

SEQ ID NO: 37026 - DNA, 476 bp, Homo sapiens
  misc_feature (1)...(476): n = A,T,C or G
cccacgcgtncggcggngtctggatggaaaggcggngcccgctgaaagaaggcgacccgagctctgctacttcctagtaagggacgtctctggagagattctgaggtgtttgagcctcttttgcctacacaccggcagtgtccttcccgcactcagagggcctctctggagccagttccaggccacccatgggccttggccccgccccctactcatggctggcagattcgtggccccacccatctcgaagcccctcggcccaggaacccaggggaagctgctgccctagcaatcctgacccggacgacagatattacaacggtgaggagttctcattccctcacctggcttcagcgcacttctcccgacctactggggcaaaccgaagggcgcccgggagcccggtctctctgagaagcaggaatctccctgtatctagctcagacggccaggagcacggccgcccctctgtcagg

SEQ ID NO: 37027 - DNA, 77 bp, Homo sapiens
cccacgcgtgcggcgctccgacctggaggtgcaccagcgcatccacacgggcgagaagcccttcgcgtgccccgagt

SEQ ID NO: 37028 - DNA, 412 bp, Homo sapiens
  misc_feature (1)...(412): n = A,T,C or G
taggaacctcgggagcggcagctccggcgcctggtagctagaggcgggttccggagatcccggcctcacttcgtcccactgtggttaggggtgagtcctgcaaatgttaagtgatttgctcaaggtgcccatttcgcaggaattggagcccaggccagttctctgagcctatcattagggctaaaggagtgcgtgatcagaatggtgtctggacggttctacttgtcctgcctgctgctggggtccctgggctctatgtgcatcctcttcactatctactggatgcagtactggcgtggtggctttgcctggaatggcagcatctacatgttcaactggcacccagtgcttatggttgctggcatggaggtattctatggaggtgcgtcactggtgtaccgcctgccccagn

SEQ ID NO: 37029 - DNA, 414 bp, Homo sapiens
  misc_feature (1)...(414): n = A,T,C or G
gaagggccctgtacaaagtgggagctggcactgggcagatctggctggataatgttcagtgtcggggcacggagagtaccctgtggagctgcaccaagaatagctggggccatcatgactgcagccacgaggaggacgcaggcgtggagtgcagcgtctgacccggaaaccctttcacttctctgctcccgaggtgtcctcgggctcatatgtgggaaggcagaggatctctgaggagttccctggggacaactgagcagcctctggagaggggccattaataaagctcancntcnnngnnnnnnnnnaccngaaaacctttaaattatatgctcccaaagtgggcctcgnctcatatttttnaaaagaaaaganntggggggcggtgcctggagacaactgagccggcccccc

SEQ ID NO: 37030 - DNA, 408 bp, Homo sapiens
cgcgagagtacgggggcgcaggtccaggtggcggtggatatgctgcccaactccaccgagcgggccatcaccatcgctggcgtgccgcagtctgtcaccgagtgtgtcaagcagatttgcctggtcatgctggagacgctctcccagtctccgcaagggagagtcatgaccattccgtaccagcccatgccggccagctccccagtcatctgcgcgggcggccaagatcggtgcagcgacgctgcgggctacccccatgccacccatgacctggagggaccacctctagatgcctactcgattcaaggacaacacaccatttctccgctcgatctggccaagctgaaccaggtggcaagacaacagtctcactttgccatgatgcacggcgggaccggattcgccggg

SEQ ID NO: 37031 - DNA, 437 bp, Homo sapiens
ctataagccccagcgggcgacgaccgaacgcccccgggaacaccgggccccgagctcggtcccgcgcccgaggatcctccacggggctagatggctgcgtcgggggcgggagcggaggcaactccggccttccctgccctgacctggaacctctgggagggctgcagagtaagtgccgcctctgcgctccgacggaggcacgaggcctgtggagtaggtccctctgttccgacaggtgcgacacttggcgctccatgcttgcgggtgccgggaggcctggcctcccccagggccgccacctctgctggttgctctgtgctttcaccttaaagctctgccaagcagaggctcccgtgcaggaagagaagctgtcagcaagcacctcaaatttgccatgctggctggtggaagagtttgtggtagcagaacagtgctct

SEQ ID NO: 37032 - DNA, 488 bp, Homo sapiens
catagaacgcttgtattgacggccctgaaataccgcgtcgacccacgcgtccgagacttgcggaatgtcgcagctggaacgcaacatagataccatcatcatcaccttccaccaatactctgtgaagctggggcacccatacaccctgaaccagggggaattcaaagagctggtgcgaaaagatctgcaaaattttctcaagaaggagaataagaatgaaaaggtcatagaacacatcatggaggacctggacacaaatgcagacaagcagctgagcttcgaggagttcatcatgctgatggcgaggctaacctgggcctcccacgagaagatgcacgagggtgacgagggccctggccaccaccataagccaggcctcggggagggcaccccctaagaccacagtggccaagatcacagtggccacggccacggtcacagtcatggtggccacggccacagtcacttatcacgaggccaggccgacc

SEQ ID NO: 37033 - DNA, 421 bp, Homo sapiens
  misc_feature (1)...(421): n = A,T,C or G
aaaagaattcctagtcagcaaagaataagaaactctccgaggccacgcaggaaagggaagcttcacctgttgagtttgcaatagatcctaatgaacctacatactgcttatgcaaccaagtgtcttatggggagatgataggatgtgacaatgaacaccgtccaattgagtggattcactttttatgtgtttcacttacctataaaccaaaggggaaatggtattgcccacagtgcaagggagataatgagaaaacaatggaccaaagtactgataagacaaaaaacgatagaagatcgaggtagtgaacgccatccacattttaaagggttatttgtcttttatataattcgtgggctttcagaaaatgttttacggtaaatgcataatactatgccttaatttctaatcattagaattn

SEQ ID NO: 37034 - DNA, 453 bp, Homo sapiens
  misc_feature (1)...(453): n = A,T,C or G
cgcgacggnggttcagggaatatttactgggcctctccgctttctctgttctaggaggagccatgaggtcagatagctacgcgcagcgcgtggcgctggagttcagcgggagcctcttcccgcacgcaatctgccttggagacgttgataacgatacgttaaatgaactggaggcgggagacaccaccgggaaggtggctgtgtataaaaatgatgacagtcggccatggctcacctgttcctgccagggaatgctgacttgcgttggggttggagacgtgtgtaataaaggaaagaacctgttggtggcagtgagtgctgaaggctggtttcatttgtttgacctgacacctgccaaagagttggatgcttatgggcaccacgagacactaatcgtagaggagcagcgtccagtcttcaagcagcacatccctgccaacaccaagggtatgg

SEQ ID NO: 37035 - DNA, 418 bp, Homo sapiens
cacgcgttcgggtgccgaaagctaacaaagaagcttctgcccctcctaaagctgaagccatagcgaaggctttagaggcactgaatgcattgttgaaaggtgctcaccgccacaaaaagaagaagagccgcacgtcacccaccttgcggcgggcgaagacactgcgactgcggagacagatcaaatatcctcggatgagcgctcccaggagaaacaagcttgaccactatgctatcatcaagtttccgctgaccactgagtctgccatgaagaagatagaagacgacggcacacttgtgttcattgtggatgttaaagccaacaagcaccagattaaacaggctgtgaagaagctgtatgacattgatgtggccaaggtcaacaccctgattctgtctgctggagagaagatggcata

SEQ ID NO: 37036 - DNA, 473 bp, Homo sapiens
  misc_feature (1)...(473): n = A,T,C or G
gatgagtgcacccattcaagttgggttagttggcttctgtttggtgtttgctacacccctgtgttgtgccctgtttcctcagaaaagttccatgtctgtgacaagcttggaggccgagttgcaagctaagatccaagagagccatcctgaattgcgacgcgtgtacttcaataagggattgtaaagcagggaggaaacctctgcagctcattctgccactgcaaagctggtgtagccatgctggtgagaaaaatcctgttcaacctgggttctcccagttacggaaaccttttaaagatccacattagccttttagaataaagctgctactttaacagagcacctggcgtgggccaagtgcctgatactcccttacactgaatcatgttatgatttatagaaatacctttcctgtagctnttatagtcattgtttttcaaagacgatataccagcccctcacccaggttttan

SEQ ID NO: 37037 - DNA, 431 bp, Homo sapiens
cgttcttcctccaaccatagccgaggggggtcttctaagcgcaagtctgcaaaggacaaaaagtcctcttctaaggatagccggccatctcatgctgccggggataaccagggagatgacgccaaggagctgacattctctgcaggcacctctcaagatacaaaagcatctgagagctccaagccatggccagatgccacctacggcactggttctgcatcacgggcctcagcagtttctgagctgagtcctcgggagcgatagcccatctctcaaaagccccctccagtctgtggtggtgaggcggcggtcaccccgtcctagccccgtgccaaaacctagtcctccactttccagcacatcccagatgggctcaactctgccgagtggtgccgggtatcagtctgggacacaccaagggtcattcgacc

SEQ ID NO: 37038 - DNA, 424 bp, Homo sapiens
cccacgcgtccgcggacgcgtgggcacaggtgtcgtgaaaactacccctaaaagccaaaatgggaaaggaaaagactcatatcaacattgtcgtcattggacacgtagattcgggcaagtccaccactactggccatctgatctataaatgcggcggcatcgacaaaagaaccattgaaaaatttgagaaggaggctgctgagatgggaaagggctccttcaagtatgcctgggtcttggataaactgaaagctgagcgtgaacgtggtatcaccattgatatctccttgtggaaatttgagaccagcaagtactatgtgactatcattgatgccccaggacacagagactttatcaaaaacatgattacagggacatctcaggctgactgtgctgacctgattgttgctgctggtgttggcga

SEQ ID NO: 37039 - DNA, 410 bp, Homo sapiens
aggaaatcagtccaccagtgtagagggcctcccttcactccagcatggaccattctattgccagattcttctggtcacagcatgggccttactggatactcaggattgggctttaagcagacctctgggtgtgacacagcctctttcagcccccagcccaaacagcagaaataggcataatttctgctgtgacaccccctacccacaaattggagagtatatcttgctatactctataccaagcctctttctagaatttttccaacaggttttgttttgttttttggcttaactcagaaccatggcgagcgttctgctttgttttgttggagacagggtctctgtcacccacgctggagtgcagtggtgtaatcacagctcactgcagcctcaacctcccaggccctagc

SEQ ID NO: 37040 - DNA, 393 bp, Homo sapiens
  misc_feature (1)...(393): n = A,T,C or G
aatcaagcagaaaactcccttcaggaagagcaggaaggccccttagacctcactgtgaatcgaatgcaagaacaaaatactcagcaagagctatctgcaggtgctcctgtgttcagtccttccaaaccattttctgaagaatatctacctgtgcacaaaacacactcgcagtgctcagccccactgacctaccacatgagatatatatcctctgtaaactgtttgcataatttatatttttgacatccttatgttactaagtatttttctgcagaatcattttaatacttaaattcatttacttagctcaatagtatggaaggatcacatattgtgtgtcttgtatatataaataaacattcttgagctaaaaaaaaaaaaaaaaaaaaaaan

SEQ ID NO: 37041 - DNA, 412 bp, Homo sapiens
aaagatgtgatcacaggcctgaaacaaaagactttgtatggacggcccaactgggataatgaattcaagacaattgcatgtcaacaccctaataccagaataggagttttcctctgtggacctgaagccttggctgaaaccctgagtaaacaaagcatctccaactctgagtctggccctcggggagtgcatttcattttcaacaaggaaaacttctaacttgtctcttccatgaggaaataaatgtgggttgtgctgccaaatgctcaaataatgctaattgataatataaataccccctgcttaaaaatggacaaaaagaaactataatgtaatggttttcccttaaaggaatgtcaaagattgcttgatagtgataagttacatttatgtggagctctatggttctgag

SEQ ID NO: 37042 - DNA, 395 bp, Homo sapiens
cccacgcgtccgcggacgcgtgggtttgccaaaaccaagattttgaaggaaatgagtggccagcgccagggcccaggccatgtggcctgcccagcctcaatgtcacttggtggcggggtggggtgggggtgggcagcagcatcccagccttgagatgcttcactttccttctctgtaaccagactttgaaaaattgttcgtttcatcaggctctgttcctcaatggccttttgctacgtgcctcccgagaaatttgtctttttgtataaatgacaaagtgttgaaaatgtatttcctgaaataaatgtttcaaatgcagaaacccaaaaaaaaaaaaaagggggggccgttttaaaggatccttgggggggccaaattttacccgtgcttgcaaa

SEQ ID NO: 37043 - DNA, 413 bp, Homo sapiens
atcgggatgccatttggcagcttaagcacatcctgccagcaggctttaagtggctgttctaggcatagccctccctgaactagaaaggagagtaaccagtttgctatgctgcgtctcaccagacacacctgacttagtagtaactctaagaacccttaacttacaaacaactttgtctcctcttagacaatattcattaaatctgaggacacagtttgacagtagttcagattcttgcatgagcaattgacagcatcagagcacacaatatcataagttacataaattacacaaagtacatcataaattacactacagacacattaggtaaaaagcatcaggcccgggccgggcgtggtggctcatgcctataatcccagcactttgggaggccaagcaggggcggatcacga

SEQ ID NO: 37044 - DNA, 405 bp, Homo sapiens
gagcccagaccaagaaagtgttccacctcagtccttatgaaaattctgagtctagttttccatgactggagatctcgctgagattctggttgtatgaactaacatgcacaagagcctttgctcttttgattagaaggaagaatatagttgatatacggtgcttctatatatagcatctgtctctttggggaactattaaagtagagcatgagcagatggggcagtgtaaggaatggatatatctgatgcttttcatacccatcaaacatcctgtcagtctacatttttactccagcagccagctctgggcaggtgtagtcttgacaaaaaccttgtcataactacaccatgtatctttcactttatgccccatgacttcactgataccactgcgtgggatgcttg

SEQ ID NO: 37045 - DNA, 403 bp, Homo sapiens
  misc_feature (1)...(403): n = A,T,C or G
cccacgcgtccgcgaagttgggcgggacttcagagatccgcctcccttgcccttcccccgcccccggacggtcacagcacccaaaccgcaggccctgctctggcaggcaggcaaagctaggcagaagaggattcccaggatcctgggtctgttccctgccccagtgctgcagaacggacttgggagccctcctttgcctgctcccgcgggtcacccagcgagtgctgagaccccattttctgtcgaggcgggccgagtcttcccttatccccagacgcctagcgggcagggttgggctgaatcaaatgggagccctccagacataaggaggccagaggctgcaaggagcggggtcgtgaccgcttacaccccttctccacagcccggcccgacctggagggcn

SEQ ID NO: 37046 - DNA, 379 bp, Homo sapiens
cactgatgttaatgtgattgatcagcatgggcatatgtaaaatgtccttttctggttgcctctctatgctattgtgttcagatacttacaccataattaaacagtaagttatagacttgctgagtttggcatagatagtgcactcatttaatctgtgcctctcaaaacttcagaatattagcatattaccacaaataatttttggtgaaactattgagatattaaaatttttgaaatcactactgttacctgttatagaaaatagtgttggcttagtctagtctctgtgtaactggttacattttgatggttgtctatactcaactggatatgtgtatgtaaattaaaaaatacatacctatccagacataaatgctaa

SEQ ID NO: 37047 - DNA, 479 bp, Homo sapiens
gatgagagccccaattgaacccctctttgaaggcctgaggtaccgcgccgaaccacgcgtgcgagcaaaggaaggctctgaaccaaaggagcaggaagaccttcaagagaatgatgaggaaggctcacaagatgaagcctcggagactgactactcatcagctgatgagaacatcctcaccaaagcagatacactcaaagctgaggatcggaagaagaagaagaagaaaggacaggaagcaggagtattttttgaagatgcatctcagtacgatgaaaacctctcgttccaggacatgaacctttcccgccctcttctgaaggccattacagccatgggcttcaagcagcccaccccgatccagaaggcgtgcatacctgtgggtctattggggaaggacatctgtgcctgtgcagccactgggacaggtaaaactgccgcctttgccctgcctgttttggagcgtctgatttataaac

SEQ ID NO: 37048 - DNA, 396 bp, Homo sapiens
tgaaggcggatcacagtccttcattttcgagtcttcaggagagaaccacctctactgtgagatgcagggcttctacctctgtgaacaacgtgcagtggttccaacagaatcctgggttggcctcatcaatctgtttttcatggcttcatggatgaagcacagtggaaagttatggtcaaaaagaaactctgaggagctctgtggtaccctacacatcacagccgcccaactgaaagactcaggcacgtacttctgtgcagttgaggcacagttctcccaggaaatctgcagcctggatccgaactgcagctgggcctgcagccccaaccccttccgtgagagaggcatgttgcccccacagtatcacttgcacagcttcgggttttctgattgacg

SEQ ID NO: 37049 - DNA, 438 bp, Homo sapiens
  misc_feature (1)...(438): n = A,T,C or G
cgctgaggacggcctcaagcatgagtatttccgcgagacccccctccccatcgacccctccatgttccccacgtggcccgccaagagcgagcagcagcgtgtgaagcggggcaccagcccgaggccccctgagggaggcctgggctacagccagctgggtgacgacgacctgaaggagacgggcttccaccttaccaccacgaaccagggggcctctgccgcgggccccggcttcagcctcaagttctgaaggtcagagtggaccccgtcatggggagaactcagccgggaccacaggcgtggctactgcggctggagctgcgatgagactcggaactcctcgtcttactttgtgctccatgttttgtttttgtattttggtttggaaatttgtagaattaaatcattttccttggtgnggaaaaaaaaaaaaaaaan

SEQ ID NO: 37050 - DNA, 589 bp, Homo sapiens
  misc_feature (1)...(589): n = A,T,C or G
aaccctactcttttttctccgccgccaaacagcgatgccttttttttggtggtgccagcaccacaaagaacccaccccccnnttgngacgtctgtacganacagcacncccggttgacccacgccgccggaactggcctggcgctggtcatattgatgtaatagcatatatatattatatatttcacaataagaaggttaaaaacagtgacagtggaaagaaatatgccaaaatattaagagttgctgcttctgaaaagtaggattggggggatttgctttccttttcttagatttttatatatcacaaatttatagcatagttaaatcttacttttgaacttggactcaaagttcaagcagatatgggttcaaaagccagatctattgctactttgctgtttcattttggacaatatatatatatatataatttaatagagagctatattaagtatagattttgggcaagttacttaagagaattaaactatacttagactataaatatactatattggtttatactatgtttaaacttaggatatagattactgtatttctcaatttccgtatagataaatagggga

SEQ ID NO: 37051 - DNA, 478 bp, Homo sapiens
  misc_feature (1)...(478): n = A,T,C or G
ggggcgggaannaacctgatncnatgcgtaagagcantcttagaaanggcncgacccactcgtgcgcccacgcgtccgctatttcttaagaataaatgagattacagattgagctatgtgattactcaacacattttatgaaagagaataagcacaatatagaaatttcacaggggtagtgtattagttattgttgcataacaaggttttccaaaatgtactggcttaaaacaacaaactgattatcacaagtttctgtgggatgaggcttaactgggtgcttttggctaaaggtctgtgttgaggttgcagacaaaagctgtcagctggggctacattttaatctgaagactgggagtgcgggggttatatataaactcattcactggcttttttcttgcagcataatgttgtggaagttcatccatgatgtatcatctattagtatttgttcttttttattatgaaatagtatttt

SEQ ID NO: 37052 - DNA, 485 bp, Homo sapiens
  misc_feature (1)...(485): n = A,T,C or G
gggtatgagatgaggaccgttgcagaggcccgaattaccgaggcatccacgcgtgcggggaagtaatcagtttgtggatcttgaggcaactaactatgatggcctgactccccttcactgtgcagtcatagcccacaatgctgtggtccatgaactccagagaaatcaacagcctcattcacctgaagttcaggagcttttactgaagaataagagtctggttgataccattaagtgcctaattcaaatgggagcagcggtggaagcgaaggatcgcaaaagtggccgcacagccctgcatttggcagctgaagaagcaaatctggaactcattcgcctctttttggagctgcccagttgcctgtcttttgtgaatgcaaaggcttacaatggcaacactgccctccatgttgctgccagcctgcagtatcggttgacacaattagatgctgtccgcctgttgatgaggaagggagcagacccan

SEQ ID NO: 37053 - DNA, 424 bp, Homo sapiens
  misc_feature (1)...(424): n = A,T,C or G
cccacgcgtccgcccacgcgtccgagacagtggagcagctgggctgtgtggtgtagacagtggagcagctgggctgtgtggtgtagacagtgggcagctgggctgtgtggtgtagacagtggagcagctgggcggtgtggtgtagacagtggagcagctgggctgtgtggtgtagacagtggagcagctgggctgtgtggtgtagacagacagtggagcagctgggctgtgtggtgtagccagttgctcttaggctgtttttcctgttgcttcaggcctaaatttggacagtgtgtgactgtgctgaataatgtgggcagttgtaacacaacagcaagtatttgtgtatctaaacatanaaaaggtgatgtgttgtgctccgatgttacaatggctacaacatcattagcaataggaatatgtn

SEQ ID NO: 37054 - DNA, 427 bp, Homo sapiens
  misc_feature (1)...(427): n = A,T,C or G
cccacgcgtccggagttcaaaagctgccgctcagctttgatggaacaacgcttattttggaagttcgaaggggctgtcgtgtgtgtggccctgatcttcgcttgtcttgtcatcattcgtcagcgacaattggacagaaaggctctggaaaaggtccggaagcaaatcgagtccatatagctacattccacccttgtatcctgggtcttagagaccctatctcagacagtgaaagtgaaatggactgatttgcactcttggttctttggagccttgtggtggaatccccttttccccatcttcttctttcagatcattaatgagcagaataaaaagagtaaaatgggaaanaaaaaaaaaaaaaaaaaaaaaaaanggggggggcgcccttttaaaaaaacccccggggggccccaactttacccgg

SEQ ID NO: 37055 - DNA, 489 bp, Homo sapiens
  misc_feature (1)...(489): n = A,T,C or G
agcgtactgctaccttggactctggccagaggncccggancgacccacgcgtccgcggacgcgtgggcggacgcgtgggcattttcagcctggtgtggggcttgtaaacatataacataaaaatggcttccaaaagagctctggtcatcctggctaaaggagcagaggaaatggagacggtcatccctgtagatgtcatgaggcgagctgggattaaggtcaccgctgcaggcctggctggacaagacccagaacagagtagccgtgatgtggtcatttgtcctgatgccagccttgaagatgcaaaaaaagagggaccatatgatgtggtggttctaccaggaggtaatctgggcgcacagaatttatctgagtctgctgctgcgaaggagatactgaaggagcaagaaaaccggaagggcctgatagccgccatctgagcagggactactgctctgctggctcatgaaataggctttggaagtaaag

SEQ ID NO: 37056 - DNA, 423 bp, Homo sapiens
  misc_feature (1)...(423): n = A,T,C or G
cccgaggcgctctgggcaggcatcctggagtcctgataggctcttgcaggaatgatacgtggcagtgcctgcagcgaggtctgggaacaccctgggtgaggcctgggggtttccgaaaatggaggcattcctttccaaatctggacagcgatcgtttttagtgtttctgtctcaagactggaaaacaatagcatttgtcttgagtgaggaagtgaagcccgctgtgttcatagcaggagagggctcccagacacaggcccgtcctcggaagagccttgagagtgcagctcggacccaccggcggcccccgtagcaggtggtgtgggtgctcgggagtggaggtgacgtcagcagcgctctctgaccgcgggtgtcacgggcatttctcanaggaagcangggattcagtgagtgtgaaggtga

SEQ ID NO: 37057 - DNA, 66 bp, Homo sapiens
  misc_feature (1)...(66): n = A,T,C or G
cggacgcgtncgcccacgcgtacgcccacgcgtccgtccacgcgtccgactagttctagatcgcga

SEQ ID NO: 37058 - DNA, 397 bp, Homo sapiens
  misc_feature (1)...(397): n = A,T,C or G
cggacgcgtgggacaaaatcctatttctttcaaagaggaacttttcacaccgaaaaaagagcatggaatgtattttatattgttataaaaatcccagatgcaaatttttttaatgccaattattagagcttctggggaaaaagtatagttcacggaaataaaactatgttctttcagggttgggtggataggtggctgctagggtgtctggctcctggcggctttgccatccatgaggcaagggctgggaacacagtgtctttgcctatggtagatccatgtgaatgtcaggaagccagctcttcagtcttggagatgatttctgctacaattctgtagaaagattaaggatggcagagtaaaaggttaccaagaatgccaggatgtttttcttggn

SEQ ID NO: 37059 - DNA, 412 bp, Homo sapiens
  misc_feature (1)...(412): n = A,T,C or G
tttttatctgacaggatcagctacaatgccctgtgttaaattgtttaaaagtttcccttttcttttttgccaataaagttgtaaataaagaccatcatacattaaaatccaaaaaaaaaaaaaagggggggcctttttaaagaacccttgggggggccaaggtttccgcgggcatgcaaggtataattttttcccttaagggggctgtttttaaacccaagttggggtttttgggaaagaaccctttcttttgggggggcacatattggaccaccccccctccagagtgtaaagcctgggggggaaaaaaaaatttttaaggggcaaaaggggaaaactaactgccaatccctgccagtaagaaaatagggcncantgcangaacccaaaaatggccggaaggccactcttt

SEQ ID NO: 37060 - DNA, 399 bp, Homo sapiens
cccacgcgtccgcccacgcgtccgtctgaggccaagatattgacgggggggattcctgggtcccattttcagcgcccagggtcacagatccacagtgggaagttctgtgggacacattggcactgagccacaaagaaggtgtggccagaacaacttgggctcctgctgaccaatgtcctctagggcctaggggacagaggaacacagagtcacagcttcaggggccgaatgagcatggcggccttcctgagagaatatgccccaccacgaaactcagcccagtagacaccatcctggtagcggcttcggtagtggccgccgtggtgccacacaccgttgaggttggagtgggcacaggcatggtaccaccagcctccccgctggtacagggcacagtta

SEQ ID NO: 37061 - DNA, 425 bp, Homo sapiens
tcgcccgtgcatgcaggcggccaagcacaaactgggggagaggaagccgccagcccgaaggctgcagcccataaactctacctcatccacactggtgcagggagccctccttgaactgacctttgattggtttctgcttcaactaccaaaacgttatctccacttacacctcacccgttaaggatcctggccacagacagtttcaagtagggtcaaatttttgttgcttgggcggctgctggaaaagtgggcagtgcccgcgccatggggtgctctgtgggcttctccaggagcagggagggtggaggggagggatggggggcacaggagctgggagccccgtctccaggaaaaggagaggggttaagatgcaccgaggctgtagctgggctacttgacttgctgaaagtgttctaaagatacac

SEQ ID NO: 37062 - DNA, 448 bp, Homo sapiens
  misc_feature (1)...(448): n = A,T,C or G
taatcgccatgtttagatagctgtttttatcaaactgtttctttgcagaggttctgtccggaagcagattctaaaaccatgttgcagtgcttgaagcaaaataaaaacagtgaattgatggatcccaaatgcaaacagatgataaccaagcgccagatcacccagaacacaggtaagatcttggcttggctctcctggccccgtggagtatctgaaaaggaattcagtggctgtagagtgacctgctcaaactcccagggctttgttgcctgggaattttaagggaggagtctgagtgtaagcagggccttcctcctttgaggagcatccagaaaaatggagggagagtcaggggagagaggaggccacaagaaccagaaaactgccctaaaagaacgttcagaaggaatcaggccggcagtccttggaaagaaaaatctagaaattn

SEQ ID NO: 37063 - DNA, 408 bp, Homo sapiens
atttttgaggaatataataaaaagattggaagagtttattgccatgagaaagaatgatttaggactgtgagggttataacatgccctaggtcagcaaccaagggttgaaatcagttctgttttatggggaaatggggggggcgacagatattattccaaaattaatattaattaatatttaaacgttggtgtttttatttaaaaatcagtaactaaccatctggaattgcaccatacttaaagtcttatccattactacactgtctttaaaacaatgtttctttaaatactctacaacgtttctaagaacgaacttcagacattttaattacagtaataatagcactccttttaaggagtttcagatccacactaaaactaaaatcataaaaggctgatacttttgtt

SEQ ID NO: 37064 - DNA, 446 bp, Homo sapiens
gttactgccacttgttgttatgtctgtcgaatacttagcctgctatcaagtcatgatccgctgtggagaagacattgcaaaaaatactggctgatatctgaggaagagaaaacacacaagaatcagcgctggaaatctctcttcatagatacttactctgatgtacgaagatacattgaccattatgctgctattaaaaaggcctgggatgatctcaagaaatatttggagcccaggtgtcctccgatggttttatctctgaaagagggtgctcgagaggaagacctcgatgctgtggaagcgcagattggctgcaagcttcctgacgattatcgatgttcataccgaattcacaatggacagaagttagtggttcctgggttattggaaagcatggcactgtctaatcactatcgctctgaagatttgctagacgtcgatacagc

SEQ ID NO: 37065 - DNA, 426 bp, Homo sapiens
tctccgaaggccctgcgggcctggcttgtgtgagcgtgtggacagtggtggccgcgctgtgcctgctcgtgttgcctacatgtccctggctgttgaggcgctgcttcagcctgcacccctcccttgtctcatagatgctccttttgaccttttcaaataaatatggatggcgagctcctaggcctctggcttcctggtagagggcggcatgccgaagggtctgctgggtgtggattggatgctggggtgtgggggttggaagctgtctgtggcccacttgggcacccacgcttctgtccacttctggttgccaggagacagcaagcaaagccagcatgacatgatagtgctattaaatggacttcgtgatttttgttttgcactaaagtttctgagatataacaataacattctgctagcaaaaaa

SEQ ID NO: 37066 - DNA, 425 bp, Homo sapiens
cagctctctgaggtggtggggaaatggggcaaagaaaaagatttttaagataagagaaataacatgtttgctcatgagaacaatccagtagagtgggaaatagatgatgtggaaaagaaaaggatagccaaagccattatctgagtaggcaaaagggaagaggctgtggtgtgcaagtgtagaaatgggctttggatataagcttgaacagttcctctacagcagcaaataagaaggcagagcatgtggatgctgatgcaggtgaggaagtggatgtggtggtgggacgatgtggaagttcccttctgattaatcagcacatgtttctggaagatttctgattaagaatgccttgccagtgctgtttcaggtcaaagttgattatttttggtaatttaatttctatgtaagtctcactaataatg

SEQ ID NO: 37067 - DNA, 443 bp, Homo sapiens
agcggagttagcagggctttactgcagagcgcgccgggcactccagcgaccgtggggatcagcgtaggtgagctgtggccttttgcgaggtgctgcagccatagctacgtgcgttcgctacgaggattgagcgtctccacccatcttctgtgcttcaccatctacataatgaatcccagtatgaagcagaaacaagaagaaatcaaagagaatataaagactagttctgtcccaagaagaactctgaagatgattcagccttctgcatctggatctcttgttggaagagaaaatgagctgtccgcaggcttgtccaaaaggaaacatcggaatgaccacttaacatctacaacttccagccctggggttattgtcccagaatctagtgaaaataaaaatcttggaggagtcacccaggagtcatttgatcttatgattaaagg

SEQ ID NO: 37068 - DNA, 430 bp, Homo sapiens
  misc_feature (1)...(430): n = A,T,C or G
ccacgcgtccgggcaaatatttcattgtcagacttaccaggtgtcagtttagagactaaccttgagaacagacttgctatcagtgccgtggtgggaacctgactgattttgctgtatttcctttttgccacaaggccagcctttgacattgtgtgtgtctgagtacttactaatatttatttcatgtagttggaattttaggattagaagtgacttgcgtagttgttttccaaacttctcaattcacaaatgccaaagtatcctaaaagaagatataaattatgttagacctacaacttctcatatctgcagcatcagagcatgtgaagtgcaaagccatgtagaacctttgaaatcagctctcttttcctttttttttcttacagcgagttttagttagacatgctgtgctgacattctgcatggttgn

SEQ ID NO: 37069 - DNA, 426 bp, Homo sapiens
  misc_feature (1)...(426): n = A,T,C or G
cccacgcgtccgcggacgcgtgggctgtgagtcaaccaaacttccttttaaaataaattacccagtctcagctaggtctttctagcagtgtgagaacggacacgtagagggtgtgagagccagaagactttaaggagagggacgagctggggcctggatgcccggggaggtggacctggaccaggacaggtgtcagcgggcagagatggggcagaggtgtggctgtctacctgcgaccggggccatgccctctcgggctcggttgaggagctgctcttcctccagaatgcgctcggacggaacgttaggaaggccctggtgagtggccccgacctcctcccccaggactggcttctccggccctctgccctttcgggcagaacagctcgtggctctttcaggaccttgggctccatcttgcagaan

SEQ ID NO: 37070 - DNA, 474 bp, Homo sapiens
  misc_feature (1)...(474): n = A,T,C or G
ntactgatgngcctcgganattgagagcatgggagggnncanccaaacgtncgcccacgcgtccgagatcatcccaaaaaagaattgccatgaacagcgttatgcgtataaaacagatggaagggttggtcattagagccttgctttttaaattttattctttccaaaaattggcggcatgctatctataattttatgtttgatgttgaagaggcaacaccagagactagagagggagattactctgatatttagtgcctaaaactttcatcttggccgggcacggtggctcacacctgtaatcccatcacttctggaggccgaggcaggctgattacctgaggtcaggagttcgagacccgcctggacaacatggcaaaacccgtctctactaaaaatacaaaaattatccaggcatggtggtgggcgcctgtaatcccatctacttgggaggctgaggcgagagaatcattg

SEQ ID NO: 37071 - DNA, 413 bp, Homo sapiens
cggacgcgtgggcagcgtcggaagtggaagctgaacctgattgcagagttggagtccagagttctggctgagcctgtccctctgccagccgagtgagtgcatggctgcccccctagggcctgttttacttgagttcaacagcagagccctggcttctgctggccagcttgccccttttggtgggacttttagtcactgccttgacctcaggtgggagctctcattatcagtcatctgttgggcttgctgttgacacctgactgcccttgtgaagctacctgagaccgcctcctgacatatggaggaaagtcttattttgagtcctgggtgtcacccttttttcaggtatagtaaacttatcctccacagggcccaaggccctgtggctgagggcagataatgtaggtctcacg

SEQ ID NO: 37072 - DNA, 406 bp, Homo sapiens
  misc_feature (1)...(406): n = A,T,C or G
attaattaggaggtatctgtcagcacatccctctgaaaccattctgagcttcagctcaagcttcgtgttgcttgaaaaatgaaatgtacagctgatctgagtttgttagaaaaagatacataaattaaacttgaagaaaatagatgacaggaaagaataatgctaagagcagaagtcaatgaaatagaaaacaaaatagagaacattaataaaactggaagttttttttttgaaaaatattataaaattgataaccccctaacaagatcgataaggaggaaggtgaacataaattaccagtatcagaaatgaaaaagggagtgtcactacaaatcctactgaaatcaaaaggacagtaaaggaatacattatgaaaaactttatgccaataaatntaacaacttaa

SEQ ID NO: 37073 - DNA, 479 bp, Homo sapiens
  misc_feature (1)...(479): n = A,T,C or G
gtgcgagggccccactgaagcctcgtagagggcgtgaagaccggctcgacccacgcgtgcgtaaatctgtgaaatctttagtatctatagcaaccaactaaaatttggtttcaaaatttaaaattttgggtgagcaaaatacgcagctctgaactcttcttaccccagagaaacatcagaaaacaagcaaaaactgtcaactcaatttgccagaactctggaaaacagtcagaggtgttcagcaaccaagtgaacactggtcaagaaagtgcaaagagaggaaagctttgtggcattttacctgcccttgccccaggtccatcccagtgcagtagcagtcttgaagagcccctgcgttgccagtgtaagtccctagttccagaaggagcagagtggacctcatacacaattgtgtatgtctgtcctaacctgtcagaatactacctgaaggacttacacaggcactcatctctgagaan

SEQ ID NO: 37074 - DNA, 405 bp, Homo sapiens
cccacgcgtccgcccacgcgtccggagggcccaaagaattggaatcctccttaatttaattgctttgaagcatagctacaatttgtttttgcatttttgttttgaaagtttaacaaatgactgtatctaggcatttcattatgctttgaactttagtttgcctgcagtttcttgtgtagatttgaaaattgtataccaatgtgttttctgtagactctaagatacactgcactttgtttagaaaaaaaactgaagatgaaatatatattgtaaagaagggatattaagaatcttagataacttcttgaaaaagatggcttatgtcatcagtaaagtacctttatgttatgaggatataatgtgtgctttattgaattagaaaattagtgaccattattcacaggg

SEQ ID NO: 37075 - DNA, 423 bp, Homo sapiens
  misc_feature (1)...(423): n = A,T,C or G
tggtgcttctgctgtccctgttcctgctgggaggccaggcccagcatgtgtctgactggacctactcagaaggggcactggacgaagcgcactggccacagcactaccccgcctgtgggggccagagacagtcgcctatcaacctacagaggatgaaggtgcggtacaacccctccttgaaggggctcaatctgacaggctatgagacccaggcaggggagttccccatggtcaacaatggccacacagtgcagatcagcctgccctccaccatgcgcatgacagtggctgacggcactgtatacatagcccagcagatgcactttcactggggaggtgcgtcctcggagatcagcggctctgagcacaccgtggacgggatcagacatgtgatcgagattcacattggtcactatcattctn

SEQ ID NO: 37076 - DNA, 408 bp, Homo sapiens
cggacgcgtgggcaagtgagttttggttgtatctaaatattttaatttcaggttccttctgtgccctgggccactatttcccaggggtgtgacagagatgcctgccagatccatatcaactagaagtctgatctctgttgctgcccttcctcagcaactatggcagtatacttttatcaccaagcaccattcccttgtccctgaatcacattttaatagagtacaatatcttctgtacaatatttctgaaacacttatgtctgaaatatatgctgtattgtatgttaacccatgacatatatgaactacaaggcttgcataatcagtgagctagtggataaatcaagacaggagcaaatgggagaaagatgaataaacaaatgaaaaaagatgaataaatgaataaga

SEQ ID NO: 37077 - DNA, 485 bp, Homo sapiens
taagatccccattcggaaccgcatggatatcatgcggaaccccacccgaattccacggtcgacccacgcgttcggtcataaagggaaaggaggaagtgagaagaaagaaacagggaaatgacagagcgttgctcagttacccaggctggagtgcaatggcatgatcttggctcactgcagccttcacctcctgggtttaagcggttctcgtgcctcagtctcccaagtagctgggattacaggctggagtgcgatggcatgaacttggctcacggcaaactccgcctccctggttcaagtgaatctcctgcctcagcctcccgagtagccgggattacaggcatgtgccaccatgccccgttggccaggctggtctcgaacaccttacctcaggtgatcctcccacctttgggattacagcaggctgaggaattaccaaggaggcaggaggtggagcataacacaccaagcctggtgccaatctg

SEQ ID NO: 37078 - DNA, 483 bp, Homo sapiens
aactgatagcatgcggacccattgagaagcctggggcgacccacgcgtacggatacagataactgtaccatggagagcttcaagtgacattctaaaagctctctctccagatcggattcaaccgcacatcatgacagatgttccggctacatttacccaggctgagtgtaatggggataaaccacctgaaaacggtcaacaaacaatcactaaaatcagggaggaattgactgatgtggacagccccctgccacactacagggtagaacccagtctggaaggtgcactcaccaaaggaagtcaggaggaaagaagaaaattacaagggaacatgctgctcaactcatccatggaggacaaaatgctaaaagaaaacccagaagagaaactctttattgttcataaggctatcacagatctttctctccaagaaactagtgctgatgaaatgacattcagagaagggcatcagtgggagaagag

SEQ ID NO: 37079 - DNA, 425 bp, Homo sapiens
ccataacttggttaaaccgtagggattatcattgtatacatgctgcgaacatgtatatgtgcaagttttaatgtattctatgttgtaggcttattatttaattttaccacttcatcacttttgtacagtggccaagcagacacctcaaactccagcatttacattaagtgcatttgtacattttaggccactggatccagattttatattggcagttattgagggcaaaagcaatatattgtaacagaatgtataaatatttttgataaaacagtctatattttattaaaaaatgaattataacactaaagctgtacctcaaaagtctcaaaaataatttgatgaaatattttatacaactcttcaaaggatccgtctgtggctttttatactcttttagggctgtctttttacaaaccatgact

SEQ ID NO: 37080 - DNA, 409 bp, Homo sapiens
atcgaagaccggaagacagatttcgaaatgcaccacaacatcaaccgctttgtcttcgagacacccttcacgctgtcgggcaagaagcacggtggggtggcggagcagtgcaagcggcggacgatcctgacaacgagtcacctgttcccctacgtgaagaagagaatacaagtaattagccaatcgagcacagaactgaatccaattgaagtggcaattgacgagatgtccaagaaggtttctgagcttaatcagctttgcacaatggaagaagtggacatgatcagactgcagctcaaactgcaaggaagtgtcagcgtgaaggttaatgctgggccaatggcctatgcacgagcttttcttgaagaaaccaatgcaaagaagtaccctgacaaccaagtaaagcttt

SEQ ID NO: 37081 - DNA, 460 bp, Homo sapiens
atgaccgtggcgggccccgtggggggatccctgagtgtgcagtgtcgctatgagaaggaacacaggaccctcaacaaattctggtgcagaccaccacagattctccgatgtgacaagattgtggagaccaaagggtcagcagggaaaaggaatggccgagtgtccatcagggacagtcctgcaaacctcagcttcacagtgaccctggagaatctcacagaggaggacgcaggcacctactggtgtggggtggatacaccgtggctccgagactttcatgatcccattgtcgaggttgaggtgtccgtgttcccggccgggacgaccacagcctccagcccccagagctccatgggcacctcaagtcctcccacgaagctgcccgtgcacacctggcccagcgtgaccagaaaggacagccccgaacccagcccacaccctggctccctgttcagcaatg

SEQ ID NO: 37082 - DNA, 406 bp, Homo sapiens
agatcaccaaggccagggagtggttccaccgcactgtgaagattgactcggacctgggggatgcctgggccttcttctacaagtttgagctgcagcatggcactgaggagcaccaggaggaggtgaggaagcgctgtgagagtgcacagcctcggcatggggagctgtggtgcgccgtgtccaaggacatcgccaactggcagaagaagatcggggacatccttatgctggtggccggccgcatcaagaacaccttctgattgagcggatgccatggccggtctccgtggggcagggttgggccgcatgtggaagggctctgagctgtgtcctccttcattaaaagtttttatgtctcgtgtcaaaacaccattgactatccccaatttttgacggggccggcctt

SEQ ID NO: 37083 - DNA, 419 bp, Homo sapiens
  misc_feature (1)...(419): n = A,T,C or G
aaggtgctcggtccttccgaggaagctaaggctgcgttggggtgaggccctcacttcatccggggactagcaccgcgtacggcagcgccagccctacactcgcccgcgccatggcctctgtctccgagctcgcctgcatctactcggccctcattctgcacgacgatgaggtgacagtcacggaggataagatcaatgccctcattaaagcagccggtgtaaatgttgagcctttttggcctggcttgtttgcaaaggccctggccaacgtcaacattgggagcctcatctgcaatgtaggggccggcggacctgctccagcagctggtgctgcaccagcaggagggcctgccccctccactgctgctgctccagctgaggagaagaaagtggaagcaaagaaagagtatccgaggagn

SEQ ID NO: 37084 - DNA, 289 bp, Homo sapiens
gagtctgggtcttccgaggccaggagcttgcctttccgctgagtccagattggcaggtggactacgagtcatacacatggcggaaactggatcctggcagcgaggagacccagacgctggttcgagagtacttttcctgggagggggccttccagcatgtgggcaaagccttcaatcagggcaagatcttcaagtgaacatctcttgccatcacctagctgcctgcacctgcccttcagggagatgggggtcattaaaggaaactgaacattgaaaaaaaaaaaaaaag

SEQ ID NO: 37085 - DNA, 411 bp, Homo sapiens
cagagcacttgcggccggtttatgtccgctcactttgtgtccggggccctggcgcgggtcctggaaggtaccctagcgggccacaccctgacagccgagctgatggcgcaccccggctaccccagtgtgcctcccaccggcggctgcggtgaaggccccgacgctttctcttgctcttgggagcggctgcatgagctgcgcgtcctcaccgcgcccacgctgcgggcccagcttgcccaggatggcgtgcagctttgcgccctcgacgacctggactccaagaggccaggggaggaggtcccctgtgagcccactctggaacccttcctggaaccctccctactctgaccccctacagacaaccaagcactaatccccttagtaccaagaaaggcgaggcagatttatccc

SEQ ID NO: 37086 - DNA, 406 bp, Homo sapiens
attagagcgatcccaacagtttgaagaaggcatcttatgaaccggctttggttcagatgaaaacttatgaagcattcactaaccagctttcctcaagacagcctgctggcccgccctactgattctaccctgcagcatcaagtctgacctggatttcctggacttctgccctgccggcaagccgtacaaaaacttccaggctgccagtccctacaagtggtgtgagctaatcccttaaatttatatttcaaatcagaccagcatattctgaagtgaaaattaagggaggaggagaaatgggcaggatcctggggaagatgagcaagcctaagtctgcctatgcctgacagaacaggagaagcttcatggtgtgaaaagggaagcctttcgttcttaaagggaatta

SEQ ID NO: 37087 - DNA, 472 bp, Homo sapiens
  misc_feature (1)...(472): n = A,T,C or G
cattgatcgccttgcgatagagcccggtagaccggccgaccacgcgtncggttccataggcgttcgccattggctctggcgactttcgcgcgttggtaggtgtagcgcggctctgaacgcgctgagggccgttgagtgtcgcaagcggcgagggcgcgagtgaggagcaaacccaggcatcgcgcgccgagaaggccgggcgtccccacactgaaggtccggaaaggcgacttccgggggctttggcacctggcggaccctcccggagcgtcggcacctgaacgcgaggcgctccattgcgcgtgcgcgttgaggggcttcccgcacctgatcgcgagaccccaacggctggtggcgtcgcctgcgcgtctcggctgagctggccatggcgctactgtgcgggctgaggcggagccgggcgtttctcgcccttgtgagatcgctgcttctctctgaggtcctggcagcccac

SEQ ID NO: 37088 - DNA, 410 bp, Homo sapiens
cccacgcgtccggagagtttcctctgggtacccctcactgagaaaaaagccacccaggaagggaggaggcaaggccccctgggaacatctggctcagtccacaggaagggatgcaggccttttcctgggaatgaggactcatcccatattccagcccccttcccccaactttttttttttttcattttaagggcatctttttaccctaaacaggtcggcagggccttttaggaggatcccccccccactcgggaaactaggcggcatttttttccatttcttttccaaaatagaaccccaataccagaaagccccctttgcaggggttcattattatgcacattaaaatcccaggaaaaggcctggaaaaggtggttaacacctgtaatcccaccactttggaaggccgg

SEQ ID NO: 37089 - DNA, 396 bp, Homo sapiens
ttccacatctttatatattggttatagcatcaccacacttcttggtactaattgctgtcttagcttggctgctataacaaaataccataaactgggtggcttagacaacaaatatatttctcacagttctggaggcagggaagtccaagataaaggtgctagacaattaagttcctgatgaggttccaaggtgctagctgattcttcttcatggtttgcagatgaatgccttcttgctatatgttcacatggtggagggagaaaccatctctcccttatttcttattgtaaaggtactaatcccatttatgaaggttccagcttcaaatgccatcacactggagattagattttcaacatgtgaatttaatgggggacaccagcattcagtcccta

SEQ ID NO: 37090 - DNA, 419 bp, Homo sapiens
aaccgccatcttccagtaattcgccaaaatgacgaacacaaagggaaagaggagaggcacccgatatatgttctctaggccttttagaaaacatggagttgttcctttggccacatatatgcgaatctataagaaaggtgatattgtagacatcaagggaatgggtactgttcaaaaaggaatgccccacaagtgttaccatggcaaaactggaagagtctacaatgttacccagcatgctgttggcattgttgtaaacaaacaagttaagggcaagattcttgccaagagaattaatgtgcgtattgagcacattaagcactctaagagccgagatagcttcctgaaacgtgtgaaggaaaatgatcagaaaaagaaagaagccaaagagaaaggtacctgggttcaactaaagcgcc

SEQ ID NO: 37091 - DNA, 443 bp, Homo sapiens
cggacgcgtgggttttcatggaattttacctatttttataattattatttcttaaagtgattaaatgagaacatggatgagtggacttcatattatgactagctttactattttaattcaccttgcataactactgaattttgtcattcttgaaagtatgcaatttttattttggttatattacaaaaatgtcaatcaaatattaaaaaatagttaatgtgatagaaaaaccttacatatttttttcttatgtttgtttagcgactttagcaaaatgttttcatataatctcatctgtttacctagaagataggttaaggaaatatattattattcctgtttgatgtgggtgaaggcagagatctaacctggcttgtttagggccataccactaattagaaaatctgtgctagaacctgtgtcttattcctataagctatgtg

SEQ ID NO: 37092 - DNA, 438 bp, Homo sapiens
  misc_feature (1)...(438): n = A,T,C or G
cacgtctgaccccgagaaggtggtctctgccttcctaaaggtgtcatctgtgttcaaggacgaagctactgtgaggatggcagtgcaggatgcagtagatgccctgatgcagaaggctttcaactcctcgtccttcaactccaacaccttcctcaccaggctcctcgtgcacatgggtctgctcaagagtgaagacaaggtcaaggccattgccaacctgtacggccccctgatggcgctgaaccacatggtgcagcaggactatttccccaaggcccttgcacccctgctgctggcgttcgtgaccaagcccaacagcgccctggaatcctgctccttcgcccgccacagtctgctgcagacgctgtacaaggtctagactcaaagcctctcccatcccttggcctggaccagtgagctggggagggactcggatgn

SEQ ID NO: 37093 - DNA, 425 bp, Homo sapiens
gcaggctgccctgagcacgctcaaccccaaccccacggacagctgtcccctctacctgaactacgccacagtggctgccctgccctgcagggtgagccggcacaacagcccctcggccgcccacttcatcacgcggctggtgcggacctgcctgccgcccggagcgcatcgctgcattgtgatggtctgcgagcagccggaggtctttgcttccgcctgtgccctggcccgggccttcccgctgttcacccaccgctcaggtgcctctcggcgcttggagaagaagacggtcaccgaggagtttttcctggtgggacaagacaacgggccggtggaggtgtccacattgcagtgcttatcgaatgccacagacggcgtgcggctatgcacccgcatcgtggacacaccctgcaatgagatgaaca

SEQ ID NO: 37094 - DNA, 418 bp, Homo sapiens
  misc_feature (1)...(418): n = A,T,C or G
cgtgtttcctgatcctgccttgggtctgtagtcatacttctggaaattccttttgggtccaagacgaggaggttcctctaagatctcatggccctgcttcctcccagtcccctcacagggcattttcttcccacaggtggaaaaggagggagctactctcaagctgcgtgtaagtgatgggggtgggagtgaggaggatctcacccaccccataattcctcctgtcccacgtctactgcgggctctgaccaggtcctgtttttgttctactccaggcagcgacagtgcccagggctctgatgtgtctctcacagcttgaaaagcctgagacagctgtcttgtgagggactgagatgcacgatttcttcacgcctcccctttgtgacttcaagagcctctggcatctctttctgcaaan

SEQ ID NO: 37095 - DNA, 405 bp, Homo sapiens
gcaactaaatggtgtttgtagcatttttatcatacagtagattccatccattcactatacttttctaactgagttgtcctacatgcaagtacatgtttttaatgttgtctgtcttctgtgctgttcctgtaagtttgctattaaaatacattaaactaaaaaaaaaaaaaaaaaaaaaaaaaaaaaaaaaaaaaaaaaaaaaaaaaaaaaaaaaaaaaaaaaaagactaaatgcaaaaaaaaaatttttaaaggggggccggcttctgggctgttcctgggaggccccttttttcactccttagactaaaaaaaactttttttttattttttgaaaaaaaaaaaaacttttgggggggtggggggaaaaaccattctcccccgggcgttttttagagaaacacct

SEQ ID NO: 37096 - DNA, 473 bp, Homo sapiens
  misc_feature (1)...(473): n = A,T,C or G
aggggaggnnnnnnnnncctgatngccnactgactccctcgaantcncggncgacccacgcgtncgctgattcttcccccacttcacagcctggagcttccagcctaacttcctgggaaaggcagtttgcatcactgctggggaagaatgggttaaagtcagccccctttgccccatccttttcccttcttggcttctaggctcctaattagctccctgtggaggccctgggttcataaactggctcaaagtggggtacaagatacctgcacagggtgggtggtgagcagaggatgggccaggccatcttctgagaccactgcccccaggccaaggatgggtcacatccagacccccagtgggacctcctccaacatcagtgacgacaggagactggcggctcggggaggggcaggactgctccctgttcaaccgggtggagggaacctcagctaggggcctctctccctctg

SEQ ID NO: 37097 - DNA, 409 bp, Homo sapiens
cagccattgcagtacattgagctccatagagacagcgccggggcaagtgagagccggacgggcactgggcgactctgtgcctcgctgaggaaaaataactaaacatgggcaaaggagatcctaagaagccgagaggcaaaatgtcatcatatgcattttttgtgcaaacttgtcgggaggagcataagaagaagcacccagatgcttcagtcaacttctcagagttttctaagaagtgctcagagaggtggaagaccatgtctgctaaagagaaaggaaaatttgaagatatggcaaaagcggacaaggcccgttatgaaagagaaatgaaaacctatatccctcccaaaggggagacaaaaaagaagttcaaggatcccaatgcacccaagaggcctccttcggcctt

SEQ ID NO: 37098 - DNA, 382 bp, Homo sapiens
cggacgcgtgggggctgtggcagcgatgattttgtcatttgggatgatacagcactgataaaagcatgatgataaagctgtggcttcatttaagcatgctctaaagaaaggtgacatttgtgaaacttcgggtaaaccaaaaaccacacctaaaagaaaacctgctaagaagaataaaagccaaaagaagaatactgcagcttccttacaacagtggaaagttgtggacaaatgttctgccattaggtcagaagacggttgcatttacccagctaccattgcttcaattgattttaagagagaaacctgtgttgtggtttacactggatatggaaatagagaggagcaaaatctgtccgatctactttccccaatctgtgaa

SEQ ID NO: 37099 - DNA, 455 bp, Homo sapiens
ctgatttcatttatatgaagttctaaaatagtcaaactcatagaagcagagaatagaacagtggttcctaaggaaaaggaggaagggagaaatgaggaaatagggagttgtctaattggtataaaattatagtatgcaagatgaattagctctaaagatcagctgtatagcagagttcgtataatgaacaatactgtattatgcacttaacattttgttaagagggtacctctcatgttaagtgttcttaccatatacatatacacaaggaagcttttggaggtgatggatatatttattaccttgattgtggtgatggtttgacaggtatgtgactatgtctaaactcatcaaattgtatacattaaatatatgcagctttataatatcaattatgtctgaatgaagctataaaaaagaaaagacaacaaaattcagttgtcaaaactggaaat

SEQ ID NO: 37100 - DNA, 412 bp, Homo sapiens
aattaaaggaaagcggcagacagagggcactttacacagtttgaggagacaagtagatgctttaggggaattggtcaccagcacctctgcagattcagcgtcatcacccagtctgtctcagctggagtcttccctcacagaggactctcaacttggacaaaatcaggaaaagaatgcctcagccagatgaggaatactgtcttgtgtaaatatattcaaggaaaacacctccactacctcactgacttcataattggaatgtcacatggtttttttaatcaagatgcagtgaactgagattctgaaactccactgtagtttactttgcctgtaccattaatgccaatgtttttataaatcacttgtacatagtacatatgggaatagttgcatatgggaatttaaaccaacc

SEQ ID NO: 37101 - DNA, 461 bp, Homo sapiens
  misc_feature (1)...(461): n = A,T,C or G
cggacgcgtggggtttacaattaagctattttttaatataggatttagaaaccaagggtatgtgttttaaaattacactttttcttaacctgtctagctgtcggaaaaggtaacagaagatggaactcgaaatcccaatgaaaaacctacccagcaaagaagcatagcttttagctctaataattctgtagcaaagccaatacaaaaatcagctaaagctgccacagaagaggcatcttcaagatcaccaaaaatagatcagaaaaaaagtccatatggactgtggatacctatctaaaagaagaaaactgatggctaagtttgcatgaaaactgcactttattgcaagttagagtttctagcattatcccatccctttgagccattcaggggtacttgtgcatttaaaaaccaacacaaaaagatgtaaatacttaacactcaaatattaacattntagg

SEQ ID NO: 37102 - DNA, 404 bp, Homo sapiens
acaaaagacaaaatagtatcaacacattataaatatttagcttactaaatatttgtaattatttttacatccatttatttctagcttgttctccagcacttcagtgtttgaaagtttcatcctaaaatatatactacaggaaagctgcagttcattttcatgcatggatcattacatttttcacttgtaaatgtaagtttttatgaaaattaaacattcccctatttttctttaaattttatacaaagcactttaatgatagatgcaaccttatttttcagttcctatttttttaaagaccacacatttactaatgttaatatgaaggtaataaatagcttactgatattttatggatgcagacaatccatgcacaaccacttcttatgatactagtttatttc

SEQ ID NO: 37103 - DNA, 420 bp, Homo sapiens
ctgacacatttgtgagaactatttatgcaggaaatgctctatgtacagtgaagtgtgatgagaaagtgaaagtgttttctgtccgtggaacatcctttgatgctgcagcaacaagtggcggtagtgccagttcagaaaaggcatcaagtacttcaccagtggaaatatcagagtggcttgaccagaaattaacaaaaagtgatcgaccagagctaacaggtgccaaagtggtggtatctggtggtcgaggcttgaagagtggagagaactttaagttgttatatgacttggcagatcaactacatgctgcagttggtgcttcccgtgctgctgttgatgctggctttgttcccaatgacatgcaagttggacagacgggaaaaatagtagcaccagaactttatattgctgttgaatatc

SEQ ID NO: 37104 - DNA, 425 bp, Homo sapiens
aattaacgtgtatatttagaggacttactatgtctcataatctgggctgctcttagcactccaagtctgagaaagcaacttaaaactaatagattttgtcctgcttaaatattattccttcacaatatttcaaaatatataatatagtatgttaagtaagcatggaattattgtcaagctaataagtacatattaacattgctatttttaggtaaaataattatctttacatttttaaatttcctcattctcactgtcatcccaaaccaggtgctggttacctatgacctaaactgtggcaaagtgttcttattcttccttctatgactcaggcttttccaatgccgtgtcacccacaatcgatcatttgcaggaggttaatgtcagataatcttcttataatagagttctggttgtgtctactg

SEQ ID NO: 37105 - DNA, 473 bp, Homo sapiens
  misc_feature (1)...(473): n = A,T,C or G
ggagcnnnnnnnnnnncctgatagcctgtagaccgccctcgaattccggtcgacccacgcgtccggatagtgtgggtggaagtagtgccagccatcttcaagctgttagccaagacttgaggttcagtatagacctgcactctctgacgccatgcattctgtgcaaatttacatctgtgtgcaagttgcaccaaatctcaattgtaccagtgaatatcattgctctgccttctacatcctgcctcctataacagcaatgaaagtgtcctttctgttgttgaatgcattgatttaaacaacctctaaatctattttgaaagctatgtggaaggtaagtattaaaccaagcaaaactgaccctctgtccccaatgggatcttctaatgatgctttangagatctcaggctatggtactgcccacatgctaatactttctacccaaacctagctcactttacaagaatcacccctn

SEQ ID NO: 37106 - DNA, 429 bp, Homo sapiens
  misc_feature (1)...(429): n = A,T,C or G
aatcatgtcagtttaattaatggtcaaagcctactaaggttgcagccaccaagaatgttgaggatggtcaagagacctgtgtaaagtagctgctgttgcatttcaggtgagactcatttccagtcacagtgatgaactctgttacccatccaacttgtctgctgaccactataggctttccagggaagggattcctaaacctggtaaacctgggagctctgtgccactgcacaggctcctggtgtctctgtgccactgcacaggctcctggtgtctctgtgctgtcagggcatgctcagctacattcaaaagggcttcaggcccatctagcaggagctgagaaatacacccatttcgatcatctgtacaccttgaactctgctccttgcaagaactttcctggaatgcaagctagagaagctgtgctcn

SEQ ID NO: 37107 - DNA, 428 bp, Homo sapiens
  misc_feature (1)...(428): n = A,T,C or G
gcgctcttcataccagaccatcagggatgatgtngcttcctttcccacctctcaagtgggagagcaaaaactggacagactagaaatgccaggggctaactgagaaccttacagaatgagcaactgcggaagccacagagtaacaccgagatgtatatcagctgccagggacaagacaaagaatggtttctaaagtaaaacctcttaccagtatgatattgaaatcagaccttattggcatcgaagaaagtgaaagtgctacttgcctgttgcctacagagactggaggaatgacaaatgtttattttaattcaacaagtagaggaatacctgctatgtgaaggagttgtggcaattcataaaattaatatattttttgaagttcgtagttttcaataataatttcttatctaaaatgcaacaagttc

SEQ ID NO: 37108 - DNA, 421 bp, Homo sapiens
gtgagtgtgcccgggctagcggcctgggttgggctttgtagctgctccgcaggcccagcccgggccgcgctcgcagagtcctaggcggtgcgcggcctcctgcctcctccctcctcggcggtcgcggcccgccggcctccgcggtgcctgccttcgctctcaggttgaggagctcaagcttgggaaaatggtgtgcattccttgtatcggcattccagttctgctctggatctacaaaaaattcctggagccatatatataccctctggtttcccccttcgttagtcgtatatggcctaagaaagcaatacaagaatccaatgatacaaacaaaggcaaagtaaactttaagggtgcagacatgaatggattaccaacaaaaggaccaacagaaatctgtgataaaaagaaagactaaagg

SEQ ID NO: 37109 - DNA, 377 bp, Homo sapiens
ctcttatctcactgttctattttttctcctcttttatattaactctttcttacctttttttctgaacttctacgccttctctttccagaactggtggaagacaaatgaaacggccaagatggtaagatgggcgcccatgccccatcattctttgggatgcatctttatcttcagcaggtgatgacacccattcttctgttaagctcacctggggaacttatcatcagttgctgaaacagacatgctggcagaatggccgagtacccaagcctgaatcaggttgtactgaaatacatcatcatgagtggtccaagacggcactctttgattttttgttacagatttataatcgcttagatacaaattgctgaggattg

SEQ ID NO: 37110 - DNA, 412 bp, Homo sapiens
tgtaaactgcctttttatctcttttgactatttttctattgaatttgtctttctaactactgaattgtagcagtgcttagtatattaaggagattggttcattgtcatgtggttattttaggcaaatttttaatgcaaattaatttttcctagctattgcaattatccttaggttattttttaatgacttctttttattcgattttatgtcagaatattatagtattggttattagctttcaacttacaccaaatttgagcagattggtaatattaatagctacagttaatcaggtacttattttctgtaatttactggcattttacataagttatctctaaaagtgattccttttttgaaggaacaaaaaaaaaaaaaaaggggcggccgttttaaagaacccctgagggg

SEQ ID NO: 37111 - DNA, 412 bp, Homo sapiens
attaaaatctccctttccaaaatgcctattccctctaaaacaagtctttatcatctggtagaggggtgggagagtgttacaaacccctttataaaactgataaaaatttacactgtgtcttggggtgggggcggaattgctgtaatgcaatgattttttttttttaactgaaaagctttgtagtataaacctggccctcctacctcagatggaaagaatcaaaagtcctggattaggcctagggatctgcattttcaaaagttttccaggggactatgatgtgtatcagtaaacctacgcagatatatacacccctgcagatatacattatatatccagtttttcacatatgatgtatgcaggtattggttaagtcacctaaatcttcttcaagccaaatattcttcattct

SEQ ID NO: 37112 - DNA, 523 bp, Homo sapiens
  misc_feature (1)...(523): n = A,T,C or G
catggtagaccgtcggtccggaccggacntccctggtctacccacgcgtccgtgttttctctacaggcaggcccccgccacttaaacgtgctgtgcgatgtgtctgggaaaggccccgtcactgcctgtgactttgacctccgcagcctgcagcctgacaagcggctagaaaacctcctgcagcaagtgagtgccgaggactttgagaagcagaacgaggaggcccggaggaccaataggcaggccgagctctttgccctttacccatcagtggacgaggtgggtgccactgtttccatactggagaatctcagtgaagactctgagagtcatgtggacaattgtgttgttcattattactatatagcagcccatggtgtcagggctcacttgtatgatttctggggcctcgtttttcactcaggcaagcctgtgtgtcatagcagagccattattgattatcacacagatgggattctgataataataacaactggaattttcatagcactttacaaaatag

SEQ ID NO: 37113 - DNA, 383 bp, Homo sapiens
aggtgacccccctgcaaaaggagctgcaggagacgctgaaggggctgctggggagcgccgacaagggcagcctcgaggtggccacgcagtatggctgggtgctggatgctgaggtgctgctggacagtgacggcgagtttctgcccgtaagggactttgtggcacctcaccttgcccagccaactgggagccagtcaccacctccagggtctaagaggctagcgttcttgcggtgggagttccccaacttcaacagccgaagcaaggacttgctgggtcgctttgttctggcccggcgacacatagtggctgcaggcttcctgatagtggacgtcccattctatgagtggctggaactcaagtctgaatggcagaaaggcgcc

SEQ ID NO: 37114 - DNA, 418 bp, Homo sapiens
tccctacctcaggtgatctgcctacctcggaatcccaaagtgctgggattacaggcgtgagccaccacgcgcggcccgatatctctattcttaaagagacttcatggatggatttccacgaatatgtccccagtcaggcatagcccagttagttaagaaacactactagccatcctctatacctaagtgagaaccttctgacttggtaattctccaatttaaaaatctttcagtaagaatcagtctcacaagttgctaatgaaaatataaattggtacaatctttataaagataatatagcaatatctttcaaaattactactacatttagcttttgacacagcaatttcacttctggaaatttatcctataaacttacatatgaatgaacatttgtataatgctatttgttgccaca

SEQ ID NO: 37115 - DNA, 410 bp, Homo sapiens
  misc_feature (1)...(410): n = A,T,C or G
cacaactgtgttcactagcaacctcaaacagacaccatggtgcacctgactcctgaggagaagtctgccgttactgccctgtggggcaaggtgaacgtggatgaagttggtggtgaggccctgggcaggctgctggtggtctacccttggacccagaggttctttgagtcctttggggatctgtccactcctgatgctgttatgggcaaccctaaggtgaaggctcatggcaagaaagtgctcggtgcctttagtgatggcctggctcacctggacaacctcaagggcacctttgccacactgagtgagctgcactgtgacaagctgcacgtggatcctgagaacttcaggctcctgggcaacgtgctggtctgtgtgctggcccatcactttggcaaagaattcacccn

SEQ ID NO: 37116 - DNA, 412 bp, Homo sapiens
  misc_feature (1)...(412): n = A,T,C or G
ttggacaggcccgtcttgaactcctgacctcaggtgatccacctgcttcagcctcccaaagtgctgggattacatgcatgagccactgtgcccggccagatttctgcttttctaagctggcctttcagccttttcatgcatcttgcccaccccactccacggcacagacctttgttccagccaaacgagttcttctccctctccacactgccatataaaaaaaaaaaacctgggaaaatcctccttcagtacccaattcaagcaccacctttcagtgcattctgatgtttgggaacataaaaatgttaagacccattcttgaaaaatatttcacatctggggatgttaaggtcacactatttcctttgtttcaaacaaagtgaacgaaatttcagagttgaattttttaacn

SEQ ID NO: 37117 - DNA, 414 bp, Homo sapiens
ctgagctggctggggaacgcctaatggctgccacattctgccgcagcctccatctatacaatatcagtgatggccgagggaaagttgggacgtttggcatcttcaaatctgtgtacagacttggcgaggacgtggtggggaccttaaacttaggggaaggaaccgtagcttgtttgcagttttcagtcagcttacagaccgaggagcgtgtacagcctgagtaccagcggcgacgtggggcagggggtgtcccctctgtgtcacatgtgactcacgcccggcaccaggaatcctgcctacatacaactagaaccagcttctccctcccaatccctctcagctccaccccaggcttctgtacagccattgtgtccttgaagtggagattgcattttgaatttgtaacggtccgag

SEQ ID NO: 37118 - DNA, 415 bp, Homo sapiens
  misc_feature (1)...(415): n = A,T,C or G
acgtgaaacctgtgaaggtggtgcttgacctggctggacgctactccggacgcaaagctgtcatcgtgaagaacattgatgatggcacctcagatcgcccctacagccatgctctggtggctggaattgaccgctacccccgcaaagtgacagctgccatgggcaagaagaagatcgccacgagatcaaagataaaatcttttgtgaaagtgtataactacaatcacctaatgcccacaaggtactctgtggatatccccttggacaaaactgtcgtcaataaggatgtcttcagagatcctgctcttaaacgcaaggcccgacgggaggccaaggccaagtttgaagagagatacacgacaggcaagaacaagtgggtctttcagaaactgcggttttaaatgctctgctttcn

SEQ ID NO: 37119 - DNA, 422 bp, Homo sapiens
cccacgcgtccgaaccatggagggtgtagaagagaagaagaaggaggttcctgctgtgccagaaacccttaagaaaaagcgaaggaatttcgcagagctgaagatcaagcgcctgagaaagaagtttgcccaaaagatgcttcgaaaggcaaggaggaagcttatctatgaaaaagcaaagcactatcacaaggaatataggcagatgtacagaactgaaattcgaatggcgaggatggcaagaaaagctggcaacttctatgtacctgcagaacccaaattggcgtttgtcatcagaatcagaggtatcaatggagtgagcccaaaggttcgaaaggtgttgcagcttcttcgccttcgtcaaatcttcaatggaacctttgtgaagctcaacaaggcttcgattaacatgctgaggattg

SEQ ID NO: 37120 - DNA, 399 bp, Homo sapiens
cttttctggagctgtgagctgcaagttatctcagtttgattaaagtgtagactggaggtacaaaaggtgaggagtgaggagatagggtagttcttccttggctggctggcttcatgatccctgggccccgcagataattaaatcgactttttctgtctcaggcatttgtatgacctctttggaggttccctgctgggtagttatccttgtatctgatggacccatctcaatttaaaatactctgccaggttcggaggttcatgcttgtcatcccagcactttgggaggctcagaggtgccattggcttgagcccaagagtttgagaccagcctgggcaacctggtgaaacctcttctccattaaaaatacaaaaaattagccaggcatggtggtatgtg

SEQ ID NO: 37121 - DNA, 411 bp, Homo sapiens
agctgtagtgggtgctgttcttccatgcataagttcgccatactaactggggtgtagatatgtacctcttttctctaggctcagagtcccccaaaggggccattggccacattgtctctactgagaagaccattctggctgtagagaggaacaaagtgctgctgcctcctctctggaacaggaccttcagctggggctttgatgacttcagctgctgcttggggagctacggctccgacaaggtcctgatgacattcgagaacctggctgcctggggccgctgtctgtgcgccgtgtgcccatccccaacaacgattgtcacctctgggaccagcactgtggtgtgtgtgtgggagctcagcatgaccaaaggccgcccgaggggcttgcgcctccggcaggccttgtatg

SEQ ID NO: 37122 - DNA, 404 bp, Homo sapiens
agattgcagtgagccgagatggcgccattgcgctccagcctgggcaacgagagtgaaactccgtcgcaaaaaaaaataaataataaaataaagaccctaggagtcttccatcttaaacctagccctacaggtgaccgaatgcagctggagaataactgcttgttaagaggcagcaaaaccttgggttttgttgggaacatcatctctcactactttgatctcttggccatatgacagactaatcattagtgtcgcatttattcttccagtggtcagatggggtgctcacatgctgcaggttccttacatgtgcttgtttccttccctaaactgaaggtgcctttgaaggcagtctttttctacatccatcaagttctctggggaagagcacttcttagctattc

SEQ ID NO: 37123 - DNA, 424 bp, Homo sapiens
aactgacatctgaaaaattcttttacgagtcagatagttttacatgttatatttatttttcaattcaactctgcaaggaagttattattcccagttttataggtaaagaaattgagactcaaagatcaatgatttgttcaaagtcacagatagtttgaggtagagttaggttctgaacctaaagtgtattctcagctttataagaccatagtacattgcatgttctaatcagtgaaagcactaggatattacataagtggtactttttataattcataaagaagtagtctgtcagaaaagagggagaaaacatgccagatcctggcttagcagttgcagtaacaggtttggcactctaaatccttatgattgttttttgaatcattaagccacaaagtttcagactctctgtcttgagttttcc

SEQ ID NO: 37124 - DNA, 427 bp, Homo sapiens
tgagactgttcctcgtagcaggtaatttcttccgaattcaaaaactcctcatggaagcatctgtttttgtcatcacggagggggctgtatgtggaattgcaaggccaaagacatctcgggtcaactcttctcaggaccagatccaagtcgccagtgagaacacacattcaggcagccttcaccagcgccctgcctcaggagcgaggctccctgcttcatgtgggcaagagctgcccttgttttcccagcgggcacttgggggtctggagcctaggaagcaaagtgaagcacacactcctgcttccttccttccctgcagatgagacgggagtcttactttgttgcccaggctggtctcaaactcctggcttcaagcaatccttccactttggccttccaaagggctgggattacaggcatgagccac

SEQ ID NO: 37125 - DNA, 405 bp, Homo sapiens
ggtgccatggcggcagcggcggtgacaggtcaccggtctgagaccgcggaggacgaggaggcctcgaggccgcagtgggcgccgccagaccactgacaggctcaggcggcggccgagctgggcgacggcgaggacgcaccggtgcgtccgctgtgcaagccccgcggcatctgctagcgcgcctacttcctggggctgatggtgttcgtgcacctgtacctgggtaacgtgctggcgctgctggtcttcgtgcactacagcagcggcgacgaatgcagcgagcccgggccccaacaccgtgcccagggccccgggcccgagcctaccttacgtcccctcacccggttggagggcatcaaggtggggcacgagcggaaagaccatctggtcaccgacagggatgac

SEQ ID NO: 37126 - DNA, 412 bp, Homo sapiens
cccacgcgtccggtttgttctactgcgcaatactcatttgctgtgtgattactgtttagtgttgaaaaaaatcaacttcctagttatcagtgtcttactgtgaagaaaatactggtcttagttgtaattaggatacaatggtacagtgtgtaattaaaactagagtaaactgttggaatggctgttttacttaaatattatcaaaactagcataacataagcaaaatagataagtacaacactccatttagtgttttgccagattgttaccagaagtctacagataccaaactttcagttctgagtttgtacaggcaagtcctgggctgggtaaaaagttatattaatattgttatccacaagagatgtgattatgggttttgattactttttttttttccaaaccctggtg

SEQ ID NO: 37127 - DNA, 422 bp, Homo sapiens
attaaggataaaggaagactgaacgcacatcaggtgcattatttgcattcaaaagccctgcagcttccagggttggatcacctggattatcaggacttgcagcttccttggcaacaggacctgtgagagctacagtgaccccagcctttggaggtggcaggactgaggatggatttggaagtccgggctcacagtctcacactgctttttctaagccatccagggacacttatggaaataggagcgtagccacttatctgtcagcctcaagcagcatcattgcaacagataatgtgttattcacacccagagataaactaacagtagaagaactggaacaatttcaatccaagaaatttactctgggaaaaattccattaaagcctccacctctggaacttctaatgtttaaaagggcaatt

SEQ ID NO: 37128 - DNA, 459 bp, Homo sapiens
  misc_feature (1)...(459): n = A,T,C or G
cttcaatatcttgcatgttacagatttcactgctcccaccagcttggagacaacatgtgggtcttgacaactctgctcctttgggttccagttgatgggcaagcggtagacaccacaaaggcagtgatcactttgcagcctccatgggtcagcgtgttccaagaggaaaccgtaaccttgcactgtgaggtgctccatctgcctgggagcagctctacacagtggtttctcaatggcacagccactcagacctcgacccccagctacagaatcacctctgccagtgtcaatgacagtggtgaatacaggtgccagagaggtctctcagggcgaagtgaccccatacagctggaaatccacagaggctggctactactgcaggtctccagcagagtcttcacggaaggagaacctctggccttgatgtgtcatgcgtggaaggataagctgaagtacaan

SEQ ID NO: 37129 - DNA, 432 bp, Homo sapiens
  misc_feature (1)...(432): n = A,T,C or G
attagggaccaggtgcctaattcacacctgtaatcccagcattttgggaggccaaggtgggtggatcacctgaggtcaggaatttgtgaccagcatggcgaacatggcgaagccccatctctactaaaaatacaaaaattagccgggcatggtggcacacacctgtagtcccagttactcgggagactaaggcaggagaatcgcttgaacctgggaagtggcgattgcagtgagccaagatcaccccattgcattccagcctgggcaacagatcgagactcttaaggaaaaaaaaaaaaaaggtaggtaagggccagttttcctgagcagggctctatttaaccaaattagttttctcatcctaccattcggttttttaatcccttaatcacaaaccaataattggaaaaattggctctataaaacaataan

SEQ ID NO: 37130 - DNA, 399 bp, Homo sapiens
cccgtttgtatggccgactcatccgccctcgaccctctaatcccctctgcctgccccaagatgctgaagccagccctggagcccggagggggcttctccttcgagaactgccaaacaaatgcatcattggaacgcgtcctcccggggctcaaggttcctcacgcacgcgagaccgggaccaccatctcgggcctggtgttccaagacagagtcattctgggcgccgatacgcgagccactaacgattcggtcgtggcggacaagagctgcgagaagatgcacttcatctgcccacaaaatctactgctgtggggctggagtacccgcggacgccgagatgaccacacggatgggggcaggcaatatggagctacacgcgctatgtacggggcgcgagcc

SEQ ID NO: 37131 - DNA, 474 bp, Homo sapiens
  misc_feature (1)...(474): n = A,T,C or G
ggagcggnnnnnnnnttcttgaaacncccctgactgnctngaannnncggnnganccacgcgtnncgacaaactggggtcacctgtttcttgactgggatttggtttcctcattataaatatgggaggtagaacagagatctccaacgtctctcccatttatcacagtaattttcttattcacagtaatcattgttggatgttaccttttcagcttcacattctcaagatggtaaaaatcatgtatatagattatcagaactctaagcaaagatgactgtcacatctgaagctgaggtgccttatgtactctactgaccttgatgggtttggagttccccattgcttatcaagagctttttaattgctttggttctttagtttttctttttgcaaaaatccttcctgtcactttaactaaaaaccaaagatttgttttctattgataagcagactagagaaaaactgccttatg

SEQ ID NO: 37132 - DNA, 433 bp, Homo sapiens
  misc_feature (1)...(433): n = A,T,C or G
tgcaacctccgcctcccggattctggctcaatgcaacctctgcctcccggattcaagcgattcttctgcctcagcctctgggtagctgggcctacaggcacgtgccaccatgcccagctaatttttgtatttttaatacagacggggtttcaccatgttggtcaggctgtctcgaattcctgacctcgtgctctgccctcctcggcctcccaaagttctggaattacaggtgtgagccaccgtgcccagcatttaaaattttaatatgtactttttgcaacccagaactcattgttcagtatgagttttgatacatataagaagggatattatgatacctgagacagttaactgatgggagtattgatagccataaaggttggttccaggccaggtgcagtggctcaagtctgcaatccccacactgaggtgn

SEQ ID NO: 37133 - DNA, 424 bp, Homo sapiens
ttcacaggcgaatagaggagaggaccaggggacgtggcttgtcccttttgtccaacaaagcattatatttttaagaatggcagacctgtttgctgaagtgttcataacataacaataggcttgaatctccaattcaaatgaatgtcaaagcacatatctttaatatgctgaatgaatatttatttttgtatccattaaaacagcatattgatctcttttattctttattaaaataaaatgctcttttttaaaaaaagaacttaaaaaaaaacggggggggcccttttaaagatcccttggggggccccaattttaccggggaaggaaaggaaatttttttttcctttgagggggccgaattatacgcccgttgggaattttgggaagggacccttcttttgggggtgagacaaactggcccact

SEQ ID NO: 37134 - DNA, 483 bp, Homo sapiens
  misc_feature (1)...(483): n = A,T,C or G
aanagccatttttggagcctattgcactgtgttctcctactgcaaatattttcatatgggaggatggttttctcttcatgtaagtccttggaattgattctaaggtgatgttcttagcactttaattcctgtcaaattttttgttctccccttctgccatcttaaatgtaagctgaaactggtctactgtgtctctagggttaagccaaaagacaaaaaaaaattttactacttttgagattgccccaatgtacagaattatataattctaacgcttaaatcatgtgaaagggttgctgctgtcagccttgcccactgtgacttcaaacccaaggaggaactcttgatcaagatgcccaaccctgtgatcagaacctccaaatactgccatgagaaactagagggcaggtcttcataaaagccctttgaacccccttcctgccctgtgttaggagatagggatattggcccctcactgcagct

SEQ ID NO: 37135 - DNA, 477 bp, Homo sapiens
acgtgctggcctatgagaaattcttccttctccttgctgaattcaactctgccatgaaccccatcatttactcctaccgcgacaaagaaatgagcgccacctttaggcagatcctctgctgccagcgcagtgagaaccccaccggccccacagaaggctcagaccgctcggcttcctccctcaaccacaccatcttggctggagttcacagcaatgaccactctgtggtttagaacggaaactgagatgaggaaccagccgtcctctcttggaggataaacagcctccccctacccaattgccagggcaaggtggggtgtgagagaggagaaaagtcaactcatgtacttaaacactaaccaatgacagtatttgttcctggaccccacaagacttgatatatattgaaaattagcttatgtgacaaccctcatcttgatccccatcccttctgaaagtaggaagttggagctcttg

SEQ ID NO: 37136 - DNA, 381 bp, Homo sapiens
  misc_feature (1)...(381): n = A,T,C or G
cggacgcgtggggtcaccatcttctgctttcagaccaaggtggacttcacctcgtgcacaggcctcttctgtgtcctgggaattgtgctcctggtgactgggattgtcactagcattgtgctctacttccaatacgtttactggctccacatgctctatgctgctctgggggccatttgtttcaccctgttcctggcttacgacacacagctggtcctggggaaccggaagcacaccatcagccccgaggactacatcactggcgccctgcagatttacacagacatcatctacatcttcacctttgtgctgcagctgatgggggatcgcaattaaggagcaagcccccattttcacccgatcctgggctctcccttccan

SEQ ID NO: 37137 - DNA, 478 bp, Homo sapiens
cggacgcgtgggcggacgcgtggggcagattttttttcagagaggaaagactcaccttcctgtttttggttctcagtaggttcgtgtgtgttcctagaatcacagctctgactccaaatgactcaatttctcaattagaaaaagtagaagctttctaagcaacttggaagaaaacagtcataagtaagcaatttgttgattttactacagaagcaacaactgaagaggcagtgtttttactttcagactccgggattcccattctgtagtctctctgcttttaaaaaccctccttttgcaatagatgcccaaacagatgatgtttattacttgttatttacgtggcctcagacagtgtatgtattctcgatataacttgtagagtgtgaaatataagtttaactaccaaataaggtctcccagggttagatgactgcgggaagtctttgatcccaacccccaaggctttgtatatttg

SEQ ID NO: 37138 - DNA, 562 bp, Homo sapiens
  misc_feature (1)...(562): n = A,T,C or G
accatgtgcgtgccgactacacacactacctcaacggagaatgcctctgatccgccctcacggacgattcaccacaatactcctcgcccgccacccgcaccgacnnnnnnntttgagncctgtaaagcatcgcggaaccgcnccggagaacccgggncgacccacgcgtccgcccacgcgtccggatggcgngangactcatagaatgttctccgctcccagacatgggtccctcggcttcctgcctcggaagcgcagcagcaggcatcgtgggaaggtgaagagcttccctaaggatgacccatccaagccggtccacctcacagccttcctgggatacaaggctggcatgactcacatcgtgcgggaagtcgacaggccgggatccaaggtgaacaaaaaggaggtggtggaggctgtgaccattgtagagacaccacccatggtggttgtgggcattgtgggctacgtggaaacccctcgaggcctccggaccttcaagactgtctttgctgagcacatcagtgatgaatgcaagaggcgtttctataagaattggcag

SEQ ID NO: 37139 - DNA, 439 bp, Homo sapiens
tcaacttacacggtgcaccagggacagagtggactgaagcatggaaaccggggcaagagacaagcactcaaatctgcctccactgacctggggacagcagatgttgtcctggggcgggtgctggaggtgacagatctccctgagggcatcacccgtactgaggcggacaaactcttcacgcagctcgccatgtctggcgccaagatccagtggctcaaggatgctcaggggctgcctggagggggtgggggggacaacagtgggactgctgagaatggccgccactcggacctcgctgccttgtacaccattgtggctgtgttccccagccccctggctggccaaaatgcctcccttcgtctcaacaactccgtgagtcgcttcaaacttcgaatggccaaaaagaactatgacctgaggatccttgagcgagccagct

SEQ ID NO: 37140 - DNA, 490 bp, Homo sapiens
  misc_feature (1)...(490): n = A,T,C or G
tgctgctaggagaaatgatgcccttggnactgacgccctcggnaccggcaccgattcgtgcggtcggcctcacgtcctcatcactgttcctgtgctcacagtcatcagttatagtccccacaacatgcgccctgaagacagaatgaacgatattacatctcgcatcttgagagccctctccttggctttcctgctgagtctccgaggagctggggccatcaaggcggaccatgtgtcaacttatgccgcgtttgtacagacgcatagaccaacaggggagtttatgtttgaatttgatgaagatgagatgttctatgtggatctggacaagaaggagaccgtctggcatctggaggagtttggccaagccttttcctttgaggctcatggcgggctggctaacattgctatattgaacaacaacttgaataccttgatgcagcgttccaaccacactcaggccaccaacgatccccctgaggtgaccgtg

SEQ ID NO: 37141 - DNA, 452 bp, Homo sapiens
  misc_feature (1)...(452): n = A,T,C or G
attgtttttcaaatgaatattttttattttacgtactttcttttgctgacctcttacttcttttcttcctttattgagtcccttcttttagaagaccaaggcttgcgagaaggtcatttccgtgggtcaaacggacatcacgaagcatcggaacacccggtattacagctgcagagtgatggctgtgacatcgcagaccttctatgaggtcatgtttgatgatggctcctttatcaaagacacatttcctgaggatatcgtgagccgagactgtctgaagctgggcccacctgctgagggagaagtcgtccaagtcaagtggcccgatggcaaactctatggagcacaatattatggatcaaatattggccacatgtaccaggttgagttttgaagatggatcccagatagcaatgaagagagaggacatctacactctagatgaagagtan

SEQ ID NO: 37142 - DNA, 426 bp, Homo sapiens
agatgcaagaatcttcaaactagcaaaccaaattcagcagcacattaaaaggttagtatactataatcaagtgggatttatccctgggatgcaaaaatagttcaacatatgcaaatcaataaatgtgatacattatactaacagaatgaaggacaaaaacatatgatcatcttgagaaatgcagaaagtgaatataacaaaattcaacatcttttgatgataaaaactctcagcaaattaggtatagaaggaatatatctcagtacaataaaggatatatatgaaaaacctacagttaacatggtactcaatcataaaaagttgaaagcttggctgggtgcggtggctcatgcctgtaatcccagcactttgggaagccaaggtgggtggatcacctgaggtcaggagtttgagaccagcctgacc

SEQ ID NO: 37143 - DNA, 436 bp, Homo sapiens
cccacgcgtccgctttccatgccaccacagtggtgcatgtcacgagcgtccatgtgaagagaccaccaggcaagctttacgtgaacagtaaagcttttttatttcacctgggtgcaggcggactgagtccgaagagtcagcaaagggtgatgggattatcattagttcttataggtttgtgataggcggtggagttgggagcagtttttttgtgggcagggggaggatcttacaaagtaccttctcaagggtggagcgggtgtatcgtacaaagtacattcacaaggacgggggaatatcataaagtacataagcgcaagggctgggagggggtgtattgtcacaaagtcaattgatcagtcagggtggggcaggaacaaatcacaatggtggaatggcatcagttaaggcaggaactggctattttcacttttgt

SEQ ID NO: 37144 - DNA, 496 bp, Homo sapiens
  misc_feature (1)...(496): n = A,T,C or G
natttgaacnccccnttggnaccggtccggaattcccattgaacgcatgcggtcgcgctccggaattgccgggacgacccacgcggaccattttactgattaacaaataagtcggaagcgacaaatatcgatatcaccatgatttaatccagatctgggattatgtagctcaacattgngacgattattatttaaaaccattatttaataagagttaaaatatgtgaatctggatatatttaaaaaaagaaatttgatgcccagataatatattangcactactgattttttagttaaattgatgcactacacttttgatgtttgaagttacaaacctgtnatttttttgtaaaggaaataattgccaaatacctaggcccattgctgacgattagttctaaaatcttattcctcctcttctcccctcacttttccctacttcctctgcaaaaagatttaacaaatacattcataaggaaatgtgtgttgtaacaa

SEQ ID NO: 37145 - DNA, 457 bp, Homo sapiens
actatttgaggaaaaagcagatatgattatctatgttgtggacaatggacaatctgtgcacttccagacaatatttgctgctgctcaaatgattgggtggtatgaccctaaagtaactcgagtcttccatgctggatttggtgtggtgctaggggaagacaagaaaaagtttaaaacacgttcgggtgaaacagtgcgcctcatggatcttctgggagaaggactaaaacgatccatggacaagttgaaggaaaaagaaagagacaaggtcttaactgcagaggaattgaatgctgctcagacatccgttgcatatggctgcatcaaatatgctgacctttcccataaccgggtgaatgactacatcttgtcctttgacaaaatgctagatgacagaggaaatacagctgcttacttgttgtatgccttcactagaatcaggtctattgcacgtctg

SEQ ID NO: 37146 - DNA, 426 bp, Homo sapiens
ctgctgatatcaaatctgcgtatgaaagccaacccatcagacagactgctcaggattggccagccacctctctcaactgtatagctatcctctttttaagggctgggagaactcaggaagcctggaaaatgttggggcttttcaggaagcataataagattcctagtgagttgctgaatgagcttatggacagtgcaaaagtgtctaacagcccttcccaggccattgaagtagtagagctggcaagtgccttcagcttacctatttgtgagggcctcacccagagagtaatgagtgattttgcaatcaaccaggaacaaaaggaagccctaagtaatctaactgcattgaccagtgacagtgatactgacagcagcagtgacagcgacagtgacaccagtgaaggcaaatgaaagtggagattca

SEQ ID NO: 37147 - DNA, 395 bp, Homo sapiens
acaggtgtgggggtgcacgccttgtggcccagctacttgagagactgagttgggaggactgcctgaacccaggaggttgaggctggaatgcagtggcacaatcactgtcacaaacaaacaatcaaacaaagtcttcctaaaaagaagaatccagacctacatggctttgttggtaaattctatcaaacatttaaggaaaaaataccaattttttttttttttaacaaatttcacaagacatttatgaggccagctttaccttgatcccaacccagaccaagactttaggaaaaaagaaaactgtcgctcagtatccctcaatatatatccggaaataattaacaaaatattagaaaattgaatctagcagggaataaaaacataactaattggat

SEQ ID NO: 37148 - DNA, 400 bp, Homo sapiens
cacgcgtccgcagagcaggctcctaaggtctccagaatgtccgtgtcagcctcctggccccaccttcctagtcctttcctgctgatgacgctactgctggggagactcacaggagtggcaggtgaggacgagctacaggtgattcagcctgaaaagtccgtatcagttgcagctggagagtcggccactctgcgctgtgctatgacgtccctgatccctgtggggcccatcatgtggtttagaggagctggagcaggccgggaattaatctacaatcagaaagaaggccacttcccacgggtaacaactgtttcagaactcacaaagagaaacaacctggacttttccatcagcatcagtaacatcaccccagcagacgccggcacctactactgtgtgg

SEQ ID NO: 37149 - DNA, 437 bp, Homo sapiens
  misc_feature (1)...(437): n = A,T,C or G
cccacgcgtccgcagagacaaagcaagagaagaagcagagactgttggcccgggccgagaagaaggctgctggcaaaggggacgtcccaacgaagagaccacctgtccttcgagcaggagttaacaccgtcaccaccttggtggagaacaagaaagctcagctggtggtgattgcacacgacgtggatcccatcgagctggttgtcttcttgcctgccctgtgtcgtaaaatgggggtcccttactgcattatcaagggaaaggcaagactgggacgtctagtccacaggaagacctgcaccactgtcgccttcacacaggtgaactcggaagacaaaggcgctttggctaagctggtggaagctatcaggaccaattacaatgacagatacgatgagatccgccgtcactggggtggcaatgtcctgggtcctaan

SEQ ID NO: 37150 - DNA, 514 bp, Homo sapiens
  misc_feature (1)...(514): n = A,T,C or G
ggcaacaggacaaccagggcaacccccactgatgcagactgagagcctcgaaaccncggtcgacccacgcgtncgagaggctgctgttcaaaaggtggcacatgttcctctttcagctaacaccataactagaagaatggatgaaatagcagagaatattgaggcacaattgttagagaggattaatgagtcaccgtgctacacaatccacaaaagggttttgtcccagaaatagactcatacatatatgatcagtgattttcaacagtggtacaaatgcaagtcagcgcagaaaaaataatctcttcaacaaatggtgcaggaacaattggatatccataaaatgaactcggatccacgctttgcaccatatgcaaaaattgactcaaaataggtataggtcctagacctaaatgtaacaacctgaaactctaaaatttctcaggaaaaaaatgggataaaatctttgtggtcttggattaggcaaagatattttcttgtgtttgtgggtaaa

SEQ ID NO: 37151 - DNA, 426 bp, Homo sapiens
cgctttgggacgccgaggcgggtggatcatgaggtcaaaagattgagaccatcctggccaacatggtgaaaccccgtctctactagaaatacaaaaattagctgggtgtgggggcgtgcgcctgtagtcccagctacttgggaggctgaggcaggagaattgcttgaacccaggaggcagaggttgcagtaagccaagatcgtgccactgcactccagccttggtgacagagcaagactccgtctccaaaaaaaaaaaaaagggggggccgttttaaagaatccttgggggggccaaattttacgggggctggcaaggtaaaagttttttccttatggggggccgtattaaaacctacctgggaattttggaaaagaacccttatttggggggggggacttattgggacaacctccttacagaaag

SEQ ID NO: 37152 - DNA, 415 bp, Homo sapiens
  misc_feature (1)...(415): n = A,T,C or G
agctattccaaaccacaaagatttagaaagtacactattctcccaccactggtatcttactgactggaagtctggtgacacctaccaatccctgtccagctccagcactgccactggcaccacagtcattgagtgcacccaagttcagggcagctcagagtctcttgcctcaccttccacctccagagccactacaccttcccaactctccattgaagtggaggccagggagatatcatccccgggaaggccccctggactgatgtcaccctccagtggctactccagccagtcggaaacaccaacacccactgtttccatgtccctgaccctgggccacttaccccctccaagcagcagtgtccgggtacgtccagtggtacctgagaggaagtcatcactaccccccgacgtn

SEQ ID NO: 37153 - DNA, 401 bp, Homo sapiens
cacacactttgaaaggtccaaaatggagtaaggaatgggaagatttgcagttaaagatggctaccatcagggaagagatcagcatctgtgtcagtcttctgtacggctccatgggattaaaggaagcaatgacatcctgatctgttccttgatctttgggcattggagttggcgagaggtgtcagaacaaagagaacatcttactgaaaacaagttcataagatgagaaaaatctacgagcttcttatttacaacactgctgccccctttcctcccagactctgacatggatgttcatgcaacttaagtgtgttgttcctgaactttctgtaatgtttcattttttaaatctgacaaactaaaaagtttaacgtcttctaaaagattgtcatcaacaccat

SEQ ID NO: 37154 - DNA, 437 bp, Homo sapiens
actagttctagatcgcgagcgggttgtgcctggaggtggaggggaagatggtcagtaggacagaaggtaacattgatgactcgctcattggtggaaatgcctccgctgaaggccccgagggcgaaggtaccgaaagcacagtaatcactggtgtcgatattgtcatgaaccatcacctgcaggaaacaagtttcacaaaagaagcctacaagaagtacatcaaagattacatgaaatcaatcaaagggaaacttgaagaacagagaccagaaagagtaaaaccttttatgacaggggctgcagaacaaatcaagcacatccttgctaatttcaaaaactaccagttctttattggtgaaaacatgaatccagatggcatggttgctctattggactaccgtgaggatggtgtgaccccatatatgattttctttaag

SEQ ID NO: 37155 - DNA, 412 bp, Homo sapiens
cttacccattagtctcagaaattgtcttaagcaacagccccaaatgctggctgcccccagccaagcattggggccgccatcctgcctggcactggctgatgggcacctctgttggttccatcagccagagctctgccaaaggccccgcagtccctctcccaggaggaccctagaggcaattaaatgatgtcctgttccattggcaaaaaaaaaaaaaaaaaaaaaaaggggggccctttaaaaagaacccttggggggcccaattttaccgggggaaggaaaggaaaaagttttccccttaaggggggcgtaataaaacccaaccggggaattttggaaaagaacctttctttgggggggggaaaaaatgggcccaacccccccccaaaatttaaacccttaggggaaaaaa

SEQ ID NO: 37156 - DNA, 428 bp, Homo sapiens
gttctcagatcttgacagtatatttgaaactgtaaatatgtttgtgccttataaggagagaagaaagtgtagatagttaaaagactgcagctgctgaagttctgagccgggcaagtcgagagggctgttggacagctgcttgtgggcccggagtaatcaggcagccttcataggcggtcatgtgtgcatgtgagcacatgcgtatatgtgcgtctctctttctccctcacccccaggggttgccatttctctgcttacccttcacctttggtgcagaggtttcttgaatatctgccccagtagtcagaagcaggttcttgatgtcatgtacttcctgtgtactctttatttctagcagagtgaggatgtgttttgcacgtcttgctatttgagcatgcacagctgcttgtcctgctcttttcaggagg

SEQ ID NO: 37157 - DNA, 479 bp, Homo sapiens
  misc_feature (1)...(479): n = A,T,C or G
gctgcggcccnccattgacgccctcgtagagggcgtgaatcccggctcgacccacgcgtccgcggacgcgtggggcaaaattcaccctgcatctgcactgagtgacttctctttctttttctgtcattcctcattaggtatagacacgtgtggccgtttacgctgtaggatcctcattcccactggctttgaacattttggggacttacaatgccgccacccgcggacaatcgctaggtggccatagaatggtcgggcgcctaccccaaactcatggaaattgatcagaaaaaaccactgtctgcaataataaaggaagtctgtgatgggtggtctcttgccaaccatgaatattttgcactccagcatgccgataggtcaaacttctatatcacagaaaagaaccgcaatgagataaaaaatggcactatccttcgattaaccacatctgcagctcaaaacgcccagcagctccatgn

SEQ ID NO: 37158 - DNA, 473 bp, Homo sapiens
  misc_feature (1)...(473): n = A,T,C or G
nattgatacgctnttcggaccgcnccggaattcccgttgaaccccctgcggcgacgaaccgatctgcataccaaacgactgattctatgacatactttaaaaattcctcatcagcaattgacaattcaataaatacatccaaacatgatcgtcgttggagccggaggtggcaggagtctatgcgctgatccctaaaatggcgaacatgtgttttcatcatttcagccaaagacctaacttcctgtgcctttcctatcacctcgagaagtaattatcagttggcttggatttttggaccaccgttcaatcatttagggttgccgcgctcccataacattttaaatgagagtattggcgttcaaaaagacagctgacgcaatgaacgaaaatgagagcagaaagtaagcatttccagcctatctaatttctttagttttctatttgcctccagagcagtccatttcgtaatgaan

SEQ ID NO: 37159 - DNA, 415 bp, Homo sapiens
tgagatttgcatcttgactggtcactccctgactgtatctgtacgtgaatgtgtttttttgtgtgtgcggctggttttagtgtcaaaagggaaataaaagtgtaaggaggacactttaaaccctttgggtggagtttcgtaatttcccagactattttcaagcaacctggtccacccaggattagtgaccaggttttcaggaaaggatttgcttctctctagaaaatgtctgaaaggattttattttctgatgaaaggctgtatgaaaataccctcctcaaataacttgcttaactacatatagattcaagtgtgtcaatattctattttgatattaaatgctatataatggggacaaatctatattatactgtgtatggcattattaagaagctttttcattattttttatcag

SEQ ID NO: 37160 - DNA, 404 bp, Homo sapiens
  misc_feature (1)...(404): n = A,T,C or G
tttttttggacttatggcagctgctgctctttctaatggctgtgcctcctgcattgcttatccacacgaagtcataaggacgaggctccgggaagagggcaccaagtacaagtcttttgtccagacggcgcgcctggtgttccgggaagaaggctaccttgccttttatagaggactgtttgcccagcttatccggcagatcccaaatactgccattgtgttgtctacttatgagttaattgtgtacctgttagaagaccgtactcagtaacaggccggaaaattgtgctctagaagaataaaactgaaaaactctagagaattttttttccccattgatgtttagaaagtttgagactganacaggaaaggccataaaatatctggttcatatcacctggtgg

SEQ ID NO: 37161 - DNA, 425 bp, Homo sapiens
  misc_feature (1)...(425): n = A,T,C or G
cggacgcgtgggttttgtatattgtgtatctgtatcaaaaatatcctctccttttcaaaaatgacaggttggaaaatgtttgtcagacttattaactggtcatattataataatactgataatgaccaactgctcattctgaaagccaaacataaaagctaggagaagtggcatctgaacatttttgctttgctgccagagtaaccctgactaataatacaataacagcaatttttttaaaaaactgagatttcctactggcttgaagtttttctatttagcaaaataattagtaataagttttgactaggtctaaagaatgaacacattgtaaacagttgccacagtagtttctaataaattgatcataaaagcagctatcctttttttttttaattctagcttctttttaaagattatttggn

SEQ ID NO: 37162 - DNA, 415 bp, Homo sapiens
ctttagtgctgacactaactttgtccaactctgtctgtaagctggagcatttttctgatgccagctgaatattagagctgaaaacacatttgttgatatttgtcttgtccacattgtgatgttcagtatttgagcttatagtgaactgagcaatcataaataagccacccttctgattgtcgttctactgtatatatatatatatttgagtgttgtttgtgtttcaataaagtcctatgttaaagttgaaaaaaaaaaaaaaaaaaggggggccgttttaaaggatccttggaggggcccaagtttacgcgggcttgcaacgttatagctttttccctatagggagccgtattataacctagctggggatctttgaaaaggacccttacttctggggagagacataatggaacaa

SEQ ID NO: 37163 - DNA, 405 bp, Homo sapiens
tcgatttagaaatatggcatgacatgaaaatacaatcttatatttacaccagcttttcactaatattttgtacctaaggtgatggggaactccattcagataataaaattctctttcagctagagaagttaacaggaataaatatatgaacaaaaaagctgcaaggataaatgtggagaaaatgatgagaattagctaacatttttaagtttttttaaactttcttcccctcagttgtacttaatatttagtggaaagtaataatttttttaattttctatcaactaatagtatagtaacaactatgattaacttgtttactttttctgaggattagtaaatcaattttttttaatttcaaatttttggatttacacttgagggtaaattaaatctggtaaactg

SEQ ID NO: 37164 - DNA, 399 bp, Homo sapiens
  misc_feature (1)...(399): n = A,T,C or G
cccacgcgttcgtccacgcgttcgatggccccggatgccgttatcttagtcatggctctaaatatgtacctgcaatcggatgttgaggatcaccgagcccgcgacgtagaagtacgggaagttcatgcgcagctgccatgccagctcgaagaaggcgagcagggtgcgggagagccccttgcagaagacgccgtacgaggttctccagcatttggctcaaggccccaagggcacatgtgacaagaaggcgccggctttttaaacattggaagttcttctgtgtcagttctgtgacagaacatttacttaacacatcatgaaggctagtttggatgtggaggggaatagactccatctatccatatgagagntggagactcactctgttatccaggctgg

SEQ ID NO: 37165 - DNA, 419 bp, Homo sapiens
acaaactgcagaaccataatcatacaaaaggagaaagttcacaaagctatccctgatgtcagcctaaagattaagtaacattcattgtttcaaaagaaaaaatgaatgaatcagcattagctttttaggctggaaatgaagtttttctaccataaaatatatcattaatttagaatttaaccttgagaccaaaacaataaaaatcttcatatcattcctgacatctttacatgaaaagccaacactatccaaacctttgaacagttaaacaaaagcacatagcctgcctcacaagtagtaacttaggatagcaagtaggataactcagaaaaggtttaatcatagggaacataatactctctgctcttaacacccctgttcactggatctgcagaagatcaaaacatgatctattatcc

SEQ ID NO: 37166 - DNA, 377 bp, Homo sapiens
agtttgcattgcagtcaacagtcgaagaaggtgtgggcagaagaaaaagctagtgatcaacagtggcaatggagctgtggaggacagaaagccaagtggactcaacggagaggccagcaagtctcaggaaatggtgcatttggtgaacaaggagtcgtcagaaactccagaccagtttatgacagctgatgagacaaggaacctgcagaatgtggacatgaagattggggtgtaacacctacaccattatcttggaaagaaacaaccgttggaaacataaccattacagggagctgggacacttaacagatgcaatgtgctactgattgtttcattgcgaatcttttttagcataaaattttctactcttaaaaaaa

SEQ ID NO: 37167 - DNA, 430 bp, Homo sapiens
gccggatgaattaagatccaataatatgctgcctgtaagagattcattttaatcttaaagacacacatagtttgagagtgaaaggatgacaaaagatagttcagtcaaatggtaaccaaaaaagagcaggggtggctatatttgtatcagacaaaataaactttaagtcaaaaactgtataaagagatgaagaaggttattatactatgataaaggtattcattcataaagaggacataacaactttaaatatatatgcacctaacattggagcacataaacatataaagcaatattaatagatctgaaggatgagatagactacgatataacaatactaggagagttaaatactccactttcgacagtgaacagatcatccagacagaaaatctatatggaaatagcggatttgaacaacactttaaaa

SEQ ID NO: 37168 - DNA, 411 bp, Homo sapiens
  misc_feature (1)...(411): n = A,T,C or G
gcagcagtaatgaggaaagccattgaaattgacgagcaacagggttgcaaggaacaagaacgaatatttcaacttgaacaagaaaacaaaggcttgagagagatccttcaaataactcgagaatcatttttgaacctaaggaaagatgatgcgtcggaaagtacttctttgtcagcattagtgaccaacagtgatttgagtctgaggaagagctgaagagtttctgagtctgtgagcttcttacatggctccaaatggtcaaataagtgaatgaatgaatggacagaaaattcaatcctttatttttttctctgtaaatatgtacagngcacgggctatgagatagcaacaaaaaatgcatagttaatggtcatagactttattccaaaacataattggaaaatagaaact

SEQ ID NO: 37169 - DNA, 488 bp, Homo sapiens
  misc_feature (1)...(488): n = A,T,C or G
ggtgacatgatccctgcgacntccgcacgaacncccgggncgacccacgcgtccgacctgttgctaatcatcaatacaatatcgaatatgaaaggaaaaagaaagaagacggaaagcgagctcgagctgataaacaacatgttttagacatgctattttcagcctttgagaaacatcaatactataatcttaaggacttggtggacatcacaaaacaacctgtggtgtacctgaaggaaatcttaaaagaaattggtgttcagaatgtaaaagggatccacaaaaacacatgggagctgaagccagagtacagacactatcaaggagaagaaaagagtgactaagaagactcctagccagcatgctagtgaaacgactagcagcgatgctatgcaaaaggcgctgatactggaaggcttgaacaccgtatgttaataggggttaagtgacagtactttgatttctcttcgtaaattatttaaacctgn

SEQ ID NO: 37170 - DNA, 401 bp, Homo sapiens
  misc_feature (1)...(401): n = A,T,C or G
cggacgcgtgggacaaatttgagctacatagataataatactcacaaatgtgagaggaattatcaagatggaaaaatacattcagtataatctcatttacataaagttcaagaaaaatatttttaatatattgtaatttgttacattggtgataaaactctacagtgaaacatatgagtgatcatcataacaattgggataatcaggagggaggagataaacgggaaatatcagcaagaagacatatattgggagtgtctggattactggcaaattctattttctgaccaaggtgtggtaacatcgatgttaatgttataattttttctcttactgtttattaggntttattatgctccatatgtaagttatgctccccaataaaaaaaaaaaaaaaaaaa

SEQ ID NO: 37171 - DNA, 455 bp, Homo sapiens
  misc_feature (1)...(455): n = A,T,C or G
gtgcacagtattttgggcgcttatacttgttaccggccagatgtgggttatgtccagggcatgtccttcatagcagcaggggtgatcttgaacttagatactgcagatgcctttattgccttttctaaccttctgaataaaccctgtcaaatggcgttttttagagcggaccatggccttatgttgacttattttgctgcatttgaagtattctttgaagaaaatttgccgaaattatttgcgcatttcaagaagaacaacctaactccagatatctacctaattgattggatctttaccttatatagtaaatctctgcccctcgacctggcctgtcgtatctgggacgtgttctgtcgcgatggggaagagttcctgttccgcacggccctgggcatcctgaagctgttcgaggacatcctgaccaagatggacttcattcacatggcccaggn

SEQ ID NO: 37172 - DNA, 400 bp, Homo sapiens
tttcatcgaagatcaattgctagcaacttgaagggtatttatacttgggtcacttgaactcagctgactaaattgtaagaacgagagcaagcaagatggctgttattggaagccataacttccagaagataattctgcacaattcgtaagttaaaaaaaatctgtagggtcttccactatcctttttcaggttgataatgctgttctgggcacacactttgtaaatggaatgttatggtacagtcgcctctcagtatccatggggcattggttccaggcctcccttaggatgccaaactccatggatactcaaaccccttctataaaatggtgtagtatttgcatatatcctagacacatcctcctgtatgctttaaatcatctctagattacttaaaat

SEQ ID NO: 37173 - DNA, 407 bp, Homo sapiens
  misc_feature (1)...(407): n = A,T,C or G
cccacgcgtccgcccacgcgtccgcggacgcgtgggtgaaagtaaaggttctcaactgtgaatgaaatttagaaagataattcttcagcagttggttgattagatgggttagtgcttttggaatatataacagtagacttgtattctttatgcactatacatatgatacgcactgacagaaaagcacagaagacatactgctaagagtttctttgtgcatttcactactgttctaggggactgctgtctctttggttccttttaggtttgtgttaggatgttgcacaagtaatcatttaatgttaaatgcaagtgtccaaagaaatgagtcttaaagttctttggtcatatttcactttaaagntaggacaggagacagctaacctgacttccattntacaaatatt

SEQ ID NO: 37174 - DNA, 466 bp, Homo sapiens
  misc_feature (1)...(466): n = A,T,C or G
ccctcttcctttatctgaagtggtgaatatagtaaatatacattctggttacactactgtaaacttgtatgtagggtgatgaccctctttgtcctaggtgtaccctttcctcatctctattaaattgtaaacaggactactgcatgtactctctttgcagtgaatttggaatggaaggccaagtttctataacttttgaacaggtactttgtgaaatgactcaatttctattgtggtaagctcattggcagcttaacattttgcaaaggaattgctttgcaggaaatatttaattctcaaaaacataatgattaatgttccaattatgcatcacttcccccagtataaatcaggaatgtttgagagaaaccattgngaactatactctttntatttttattttctatttttttaatatttgttttttggggacggagtgccttcttgtgcccaggctagatgcaag

SEQ ID NO: 37175 - DNA, 438 bp, Homo sapiens
  misc_feature (1)...(438): n = A,T,C or G
cccacgagtncgggactttgttaggtatataccaggatcaaaatgactactactaaaaaccatctcgggagctgggtacagtagctggtacccataattccagctaattaggaagctgaggcaggaggatagcttgaggccaggagtttgaggccagcctcggcaacatgcaagaccctatctctcagaaaatttaaagaatttaaaattcttgtatatgtggaccacatcataattagaatgtacttctcacctaaattattatgtagtcatcaactaaaatcttaaacattgattttttctttattgcttttagattttaaaattgccaaagattattcactttttttggtctaatattagcaatgaaaagctcaagaagttcatanaatttgggttggttttaataatagttatagcaatagtaaaaaatttctt

SEQ ID NO: 37176 - DNA, 403 bp, Homo sapiens
caaagacacaacctctaaccaggtctctttgaaaaagatgataataaaacttctacacacaatgcactgttctttcatttctgcttttttactgcctgttttcctgagtttaactgtttcagcctctatctttgtgtctctccactctttccctctttccctctcttacttctcttttcttggttctttcttcttatctgtctgtcttgatctctattctagcctctttttctgattggccctctcccctctcttctgtctgattggcctgtatccttccatcaccccatctgtctgctggattctccctgtctgcctgcagtaatgtatgtgatagcactttataaattataaagcactatgttgtataaaacaccattatcactttgtcttccttcttacg

SEQ ID NO: 37177 - DNA, 414 bp, Homo sapiens
  misc_feature (1)...(414): n = A,T,C or G
cacagatccaataccttctgtcccctgctcccttgttccccagtcccctgtgtcatcaagatgtggtcagcgtgggacggcttcagatccgggccctggctacacctggccacacacaaggccatctggtctacctactggatggggagccctacaagggtccctcctgcctcttctcaggggacctgctcttcctctctggctgtggtgagtttccccgaaagagagaggagctgggagaggagggagagacagaagtcagggcagccacagtcccatggagagcactgaagccttagttttagcacagatgttgccgtggcagttacttccatctgtgttactcagattggttctaatccttgagacttcccttggggcaccttgggaggctgaggcaggaggatcacttgn

SEQ ID NO: 37178 - DNA, 400 bp, Homo sapiens
aatcgattatccagtgagagcagctgtaagagctggctgagctccatgacgatggacagtgaagatggctaccagacgtgtgtgtctgaggactccagcaggggtgccttcagtcggcagacgagtacagatgatgagtgctttatccccaaggagggggatgattttctgaggaggtcatcttcaaggaggaaccggagcatcagtaacaccagcagcggatccatgtctcccttgtgggagggcaacttatcaagcatgtttgggaccctgccccggaagagcagaaagggaagtgtccgaaagcaactcttgaaatttatccctggccttcatcgtgctgtggaagaggaagaaagtcgcttttgacggattggggtgtcctttcaaattagcttaa

SEQ ID NO: 37179 - DNA, 416 bp, Homo sapiens
  misc_feature (1)...(416): n = A,T,C or G
cgcgagcggccgctcgcgatctagaactaggtggatttccatgcagctgcctccacctgctcaccctcccgggcttccttgctcaccggccggcttggccttcgcaatggagtcacacgcaactttgcagtcacttctgtgggaggccttccgctcaacgagaccaccttggcagaggtgctgcagcaggcgggttacgtcactgggataataggcaaatggcatcttggacaccacggctcttatcaccccaacttccgtggttttgattactactttggaatcccatatagccatgatatgggctgtactgatactccaggctacaaccaccctccttgtccagcgtgtccacagggtgatggaccatcaaggaaccttcaaagagactgttacactgacgtggccctcccttn

SEQ ID NO: 37180 - DNA, 400 bp, Homo sapiens
  misc_feature (1)...(400): n = A,T,C or G
aaatgagccctctgcagatgccccagctgctctctaccagacaattgaagaaaatattaaaatctttgaagaagaagaagttgaatttatcagtgtgcctgtcccagagtttgcagatagtgatcctgccaacattgttcatgactttaacaagaaacttacagcctatttagatcttaacctggataagtgctatgtgatccctctgaacacttccattgttatgccacccagaaacctactggagttacttattaacatcaaggctggaacctatttgcctcagtcctatctgattcatgagcacatggttattactgatcgcattgaaaacattgatcacctgggtttctttatttatcgactgtgtcatgacaaggaaacttacaaactgcaacgn

SEQ ID NO: 37181 - DNA, 411 bp, Homo sapiens
cggacgcgtggggcagacaatgagatttaagccccttcctccaaactcagacattggatggagagtagaatttcgacccatggaggtgcaattaacagactttgagaactctgcctatgtggtgtttgtggtactgctcaccagagtgatcctttcctacaaattggattttctcattccactgtcaaaggttgatgagaacatgaaggtagcacagaaaagagatgctgtcttgcagggaatgttttatttcaggaaagatatttgcaaaggtggcaatgcagtggtggatggttgtggcaaggcccaaaacagcacggagctcgctgcagaggagtacaccctcatgagcatagacaccatcatcaatgggaaggaaggtgtgtttcctggactgatcccaattctgaa

SEQ ID NO: 37182 - DNA, 395 bp, Homo sapiens
gcggaggtgcaggtcctggtgcttgatggtcgaggccatctcctgggccgcctggcggccatcgtggctaaacaggtactgctgggccggaaggtggtggtcgtacgctgtgaaggcatcaacatttctggcaatttctacagaaacaagttgaagtacctggctttcctccgcaagcggatgaacaccaacccttcccgaggcccctaccacttccgggcccccagccgcatcttctggcggaccgtgcgaggtatgctgccccacaaaaccaagcgaggccaggccgctctggaccgtctcaaggtgtttgacggcatcccaccgccctacgacaagaaaaagcggatggtggttcctgctgccctcaaggtcgtgcgtctgaagcctacaag

SEQ ID NO: 37183 - DNA, 414 bp, Homo sapiens
atattacataaaagtacctatggtctcacagatgaagggagtcagaagaaccaaactcccagaagacatataaatctaaatgccttttttactttagagtgaaaactgtaatagctaaattataatggacatctgctcattttctccctccatgtagacatggaaagctacacggaaataaccgagtttatagtagctaccatatattaaacgtttcctgtatgccagccactgtgcaaagcatattatatatattgtctcatttaatcctcacaactctgtaaaataagtattgtttgccccatttttccaatgaagaaaccgaggctaaaataggttgaataacttacctaaattcaccatcctcaaaaggtgttaaagacaggattccagtacaggtctctcatttccttt

SEQ ID NO: 37184 - DNA, 432 bp, Homo sapiens
caaagtgctgggattacaggcataaagtaccatgcccagccaaggattttaatcagtggatacaaaggcaactactggatgatgtagaacagaattgcgtactcagtgtgcatgcagccacttcccacctcttcagccatggcaggctttgctaattgatcacaacacacgttctccctgttatcacacatggcttcgtaatccctctcctcacagtgcaccaagtagccaccaccaacctaagtggtggcacaagagaggaaagtttggtcatgagtgttgtgctgggagagaaaggcagggattagaggccacccccagcctacccgatgtgaagggccatccccaatttaataactgtgtaacccaggagtgtgttcggtagccacaggtggcctcctttggaaaatgatccctccagctgcaaaggga

SEQ ID NO: 37185 - DNA, 423 bp, Homo sapiens
atttcttgttaccctcttttgtgcctttttattttgccaaccgtgtttatagaaaggacattactaatgacattttgcagattaaaaacattcatttgaacacagtagtcccctagaaaaacaactctacaaaaattttgcagccttattcattataattttaataaaattaacacaaaatcagtcaagaaggaaacatgtatattagtgaagtgtttttggagactgtttgaatgtgaccaaatgtggttctagttgacttcttttcactttggcttatatcaactcttgagagttaatgtgatcatgatattgcaaacaactataaatggtctctaggccttactttgtgattatacgttatctctggctagaaaaaaataatggtagtaaagaaactgacaaactgaaaataagaaaaca

SEQ ID NO: 37186 - DNA, 436 bp, Homo sapiens
  misc_feature (1)...(436): n = A,T,C or G
cccacgcgtccgcggacgcgtggggtaaattaaaaggtttgaatccaaagcagagagaactgcttctggaaaagtgtagtttaattttaactattctaaaagcaatgagcaaaggcccttgtccaaggcgttgacagttttctaaagtggctatgctgtatatctggatgcatgcctttgggctgccactgcttgattcctttcatgtacagataatattacttcagtttagatttcccactttaaaatgcagtgatttgtgttgaatacatcttgattgtgctttacctaaagtattttcttaaaaggctttgtgtaaaatttaaatgtatatattttcctgtagacttccatcatgattttcagagattagccttanaaaatttggccctaagaaattcattcagtgtttttctagatgacctctgtacataga

SEQ ID NO: 37187 - DNA, 430 bp, Homo sapiens
  misc_feature (1)...(430): n = A,T,C or G
cccacgcgtccgaccaattccttttaaggattgatgaggagcttctgggagatggacacagctatagtcctagagctattcattcatggctgaccagggccatgtacagccggcgctcgaagatgaaccctttgtggaacaccatggtcatcggaggctatgctgatggagagaggttcatatgaatacaaataacttatttcctttaccacccaacctagtacctgtgtagtatctcttctgtctcttctccccaagtgaatcccactttaactcagaccccatggtccccttcttcagctaagatgaacctaaggtgaaatgagttttgacccattgtgtcctgttagcttcctcggttatgtggacatgcttggtgtagcctatgaagccccttcgctggccactgggtatggtgcatacttggctn

SEQ ID NO: 37188 - DNA, 475 bp, Homo sapiens
  misc_feature (1)...(475): n = A,T,C or G
gggcaggnnnnnnnaaatgatagccttccgacnggcntcgaannnccggnngacccacgcgtncgagcgagtgccaagaaccggaggcagaaggctcatgtcaccgatccaaaggcagacccccgggctctcctagagtgtcggagggaactaatgcaactggaaaaggagctggtagaacgtcaacctcaagtggacatgttacaggagatttcaaacagccttctcattaagggacatggagaagactgtattgaagctgaagaaaaggtgcatgttattgagaagaaactcaaacagttacgggagcaagtgtcccaagatttaatggccttgcagggaacccagaacccagcctcacccctgcccagcttcgacgaggtagactcgggggaccagcctcctgcaacatccgtgccagctccccgagcaaagttcagagcagtgagaactacagaaggcgaggaggagacag

SEQ ID NO: 37189 - DNA, 432 bp, Homo sapiens
agattctcaagggtgtgcccatggggattagaggactgagctctgtgcttgagttggggggtgtgcccactccaccttttattgtccttgcgtgggtcataggaagaggccaagaaagacagaacgatgctgtatttatgggaaaaggctaccagaatttccatccgagggtgggggtccattcctctacctatgtggaaggcaggctctccttgacaatagccagggctgcatgtgtcttccactcaatctacaacgtatccacggagagtgaccttgtactcagtactcagtactccagccccttggctggagttagctatgtccgctccacccctgtgccttttctggcccacttgaaattagatgtcttgggttgcagcctatttttaaggatgagtctcactcttagactatgagctcttgaaaaat

SEQ ID NO: 37190 - DNA, 405 bp, Homo sapiens
atcttgactagataggctgaaggcacatggttccctccaaaaaccactattgataccactacaaaaacaagccagcaaaaagatactgtagagaggttggcttgcttccctctcttcctaactgcatgttgaaaaataagccgttattgatcttaaacatcggtcagatgagtcatacattgggttattttttatatacatgtatacacaaaatatttcaaattgaaagcaacatcttaatggattcaaaactattacaagctgttgtctaaaacaggtgagaaaaaaatttataactgtaaaaacaaatgcacatattgatatttaaaatgcgtaattaagaaaacccattgctgctgtgttttcttgtataccaataattaagccactactgttggcactggt

SEQ ID NO: 37191 - DNA, 459 bp, Homo sapiens
  misc_feature (1)...(459): n = A,T,C or G
nattgatcgcctgcggnacctttgacgactntccgggncgacccacgcgtccgaagaatacaggaaggactatgagcattgaggtgggtggatcgcttgagcccatgagttctgggctgtagtgcgctatgccgatcgggtgtccgcactaagttcggcatcaatatggtgacctcccgggagcgggggaccaccaggttgcctaaggaggggtgaaccggcccaagtctatgcaaccacccagctaatttttgtatttttagaagagtgggggttttgccacgttgcctgggctggtctcgaactcctgacctcaagtgatccaaccgcctcggcctcccaaggtgctggaattgcaggcgtgagccaccgcgcccggcctcacttagtcttttaccagttcatctgatttttactttggtcccatttataattcaaagataatataaacgtcttatg

SEQ ID NO: 37192 - DNA, 420 bp, Homo sapiens
cggacgcgtgggcggacgcgtgggatcgccgccatcatgggtcgcatgcatgctcccgggaagggcctgtcccagtcggctttaccctatcgacgcagcgtccccacttggttgaagttgacatctgacgacgtgaaggagcagatttacaaactggccaagaagggccttactccttcacagatcggtgtaatcctgagagattcacatggtgttgcacaagtacgttttgtgacaggcaataaaattttaagaattcttaagtctaagggacttgctcctgatcttcctgaagatctctaccatttaattaagaaagcagttgctgttcgaaagcatcttgagaggaacagaaaggataaggatgctaaattccgtctgattctaatagagagccggattcaccgtttggctcgatat

SEQ ID NO: 37193 - DNA, 477 bp, Homo sapiens
  misc_feature (1)...(477): n = A,T,C or G
gatgcgggccccattgaacgcctcggtagaggccgtaagacccggctcgacccactcgtncgattttcctaattttctatgataagtatatattactttcaactctaattttttagtttgatggaataaaaatatgtatgtacattttattatatgttgtatatgatatatgtatgtatgtaatacatatctgtatgtgtatttgaatttcctatcaactgatactcctttgtataatagcacaataattggcgttcactaagctgatctgaatttttcacttgtagagatcatgtatataatatatgtatttttcactcatagagatcacacttatcgaatgcatccaagccccgtgtatcatgttgcaaagcatttccacacataagactctgtaattatgatttctacagttaccatgataccttactgtgtgctgcaccaaaattagctattccctctgctgctagcctagat

SEQ ID NO: 37194 - DNA, 425 bp, Homo sapiens
ctcagactctgactgactgcctgattcagatccggagtcagacacttcccgagaaaacaaagttcaagcaaaaccaccgaaagttgatggagctgagttttggaaatctagtcctagtattctggccgttcagagatctgcaatcctcaagaagcagcaacagcagcagcagcaacaacaacatcaagcctcatctaatagcggatcagaagaggattcctctagcagtgaagattccgatgactcatcaagtgaggtcaaaaggaaaaagcataaagatgaagattggcaaatgtctgggtcaggatctccatctcagtctggttcagattcagaatctgaagaagagagagagaaaagcagttgtgatgaaacagaatctgattatgagccaaaaaacaaagtcaaaagcagaaaacctcaaa

SEQ ID NO: 37195 - DNA, 411 bp, Homo sapiens
cccacgcgtccggaatcttaaacatcctagtgtttgtgtattttgctttatccctactaccacttcccttaaatactgttcactgtcatctttcacttagacctgcactgtccagtaccatagccactagtgtcaggtgactggtccaaattgagatttggtgtgagtgtaaggtacacactggtatttgtagccttagtatgaacagataatatatatggtcatattcctaatttttttcgattatatgttaaaatgatattttgaatatgtaaagttaaatgcattatcaaaatttcatcttttttgccattttattatatgtggctactaaaaaattataagtaatcagactgggcgtggtggcttacacctgtaatcctagcactttgagaagtcaaggcaggaggt

SEQ ID NO: 37196 - DNA, 398 bp, Homo sapiens
ttgagaacctccccaggacagtcatcagaggctctcaggctgagctcaagtgccccgtgtgtcttttggaatttgaggaggaggagactgccattgagatgccttgccatcaccttttccattccagctgcattctgccctggctaagcaagacaaattcctgtcccttgtgccgctatgagctgcccactgatgacgacacttatgaggagcacagacgagataaggctcgaaaacagcagcagcaacaccgactggagaacctccatggagccatgtacacgtgaggaggttggggctgagtgctggccctctgcgtcttccttattaaccttgaatcctcattaaaggtttctttacccaaaaaaaaaaaaaaaaaaagggccgcccgctttaaa

SEQ ID NO: 37197 - DNA, 397 bp, Homo sapiens
agcatttcaaagaagttaatgacatcacagtattaaatccatctgacatggaaaccaactctaactacatcatagtttttttttgttgttgatgttttttgtttgagatggagtctcgctctgccgtcaggctggagggcagaggcaccccaatctctctggtaccctccgcctcctgtaatggagcgaagttcctgcccagcccttctggatggctggaacctcatgcgcatgccaacacctccggaagcccttcgcggggtctcgcccgccggttgcctacctatgtcggggtttctccctatgctggctttcacaccgcggctggggccttttttaaaatcaccacttcttcggggcctgtacctctgcgcccccccccccctccctttttaac

SEQ ID NO: 37198 - DNA, 389 bp, Homo sapiens
atcggcgtccgcagcgggcggctgctgagctttcttgaggtgcagtgttggggatccagagccatgtcggacctgctactactgggcctgaatgggggcctgactctcttactgctgctgacgctgctggcctttgccgggtactcaaggctactggctggggtggaagtgagtgctgggtcaccccccatccgcaacgtcactgtggcctacaagttccacatggggctctatggtgagactgggcggcttttcactgagagctgcagcatctctcccaagctccgctccatcgctgtctactatgacaacccccacatggtgccccctgataagtgccgaagtgccgggggcagcatcctgagtgaaggtgaggaatcgccctcccg

SEQ ID NO: 37199 - DNA, 409 bp, Homo sapiens
ccagcctcccacactgaggccaggtctaccccccatcataccagcccccaggaccactaccccacggccagccaggggtccagagctagcccaggctggggatctcgactcagacaagatggtgacaatgccttgagtctgaggcatcctctgcctgctttcctgcctgccccacctgcctcatattgtgtgggcctttttttgtttgtttcattcattggttttttttttttaataatttaaaaggaaattttggttttttttaaaggcaatatttttgtatacaaacgggttggcccccaccccctgcggggggccctcccacagtattttgggcaaggaacccctgctcccaccctttcaaagacggggacacagcccctatttgaaaccctgatcatcaccagag

SEQ ID NO: 37200 - DNA, 429 bp, Homo sapiens
tgaaatttaaataatagacatacagagatatacaaatatattatatatttttctgagaattttgatatgtcaatctgcagccattcttcaagtcgtagcatttggagcaaaaaaaaaaaaaaaaaaaaaaaagggggtttttttttgggggaaaaaaaaaaaaagttttttttttttttttttgaaggggcttggtttttgaaaaaaaccccggggaaaaacgggggccctttttttttttggccccaattttattttttttttttttggaaaaaagaaaggggttttttttggggagaagggttttggggggaaacccaaacccacttttccaaaaagaaaaagaaccccccccctccgcccttaaccccaacccttcccaaaaaaaaggggcccggggttttttttttgtcccctccccacaaaggg

SEQ ID NO: 37201 - DNA, 398 bp, Homo sapiens
atgagctggctgtggccagggtggcccacctgcccttccctgttcctttcttgcacgcgctccctgcctgggcacaccaaactggttgaaacacagctttctaccatccaggtacatgcccaggcctggttctcacccctgttggagtcagctttcaagattgcctgtgcccctgctctgccccatcctggctggcagggctgcatgtttccatcctgtttgcctcttttatttaatgccaaagttttagccaaagacatcttcctacttttgttgtgtttcagcattctgttctgcactgtgggctggctctctgccccaaccctgggcactggcccctggctgggccatttcatggctcaaagcctctgggggctcaaggaaggctgggctgctca

SEQ ID NO: 37202 - DNA, 457 bp, Homo sapiens
attctatttcctggcacctccctgcctgtccttggggattctacttcttcctgtgtgggagcccatagctgttgtctaacaggtaagaaatgaaattgaactattgactgggccccacaaatccataaaatggctgcagacagttgtttctgtgtcctgttctacccccactccagtacataactactatgtactgtgtagagccattctatatgctgaatgttctgctgttgcaaacttgccagggtattagccagtgtttgcgccaagcagttttctgggacaacagaatgactcagaccaagatggataggatggttagggctttgcttcttgctgtttttctttgaagctagttcattgtcctgcaggtcccttcatcttccatacctagcccactcttttagcccttaccttaaatctctcagataagttggttcacaaagaatgttaagag

SEQ ID NO: 37203 - DNA, 471 bp, Homo sapiens
  misc_feature (1)...(471): n = A,T,C or G
agggcaggnnnnnnnaaactgaggcccgtgngaagcctcgaantcncggncgacccacgcgtccgaaaccctcttaattctagagcagttgaagacatctcttcatcgaggactaacccctacagttatgcaatgagtactgaagaagccagatttcttacctaccatatgtggccattaacttttttgtcaccatcagaattggcaagagctggtttttattatataggacctggagatagggtagcctgctttgcctgtggtgggaagctcagtaactgggaaccaaaggatgatgctatgtcagaacaccggaggcattttcccaactgtccatttttggaaaattctctagaaactctgaggtttagcatttcaaatctgagcatgcagacacatgcagctcgaatgagaacatttatgtactggccatctagtgttccagttcagcctgagcagcttgcaagtgct

SEQ ID NO: 37204 - DNA, 398 bp, Homo sapiens
  misc_feature (1)...(398): n = A,T,C or G
cccacctgaacccaggtgaaataaacagctttattgctcacaaaaaaaaaaaaaaggggcgcccgtttaaaagaatccttggggggcccaaatttaacgcgtccatgcaaggaaaaatttttttctttaagggggggcgaattaaactttcactgggaattttggtaaggaaactttctttttggggggggcctaagggggacaccccccctccaaaaattaagctcttgggggaaaaaaaaaaattttaaggggtaaagggggaaaaaaaacctaaaaaccctgggggtttgaaaatggcnanctagctggactgccaacattgcccgcggatgctagaactcatgctcctccacaagtgctaggtctaggtggccatgacttggccaagagccgcc

SEQ ID NO: 37205 - DNA, 319 bp, Homo sapiens
cccacgcgtccgaagaatagcccattgttcattcttgtgctgtacaatgaccactgttattgttactttgacttttcagagcacacccttcctctggtttttgtatatttattgatggatcaataataatgaggaaagcatgatatgtatattgctgagttgaaagcacttattggaaaatattaaaaggctaacattaaaagactaaaaaaaaaaaaaaaaaaaaggggcggccgttttaaaggatccttgggggggcccaagtttacccgtgcatgcaaagaaatagctttttccttatagggagccgaattaaaac

SEQ ID NO: 37206 - DNA, 443 bp, Homo sapiens
  misc_feature (1)...(443): n = A,T,C or G
ctcatttgaccttgcacacccatctagctgccttcctatttttcttcttccttttactgccaaataacaaatgacctgatttcttctctactgcctgtaccctggcctgttcttaagcactagtaatctaacttttatttttatttgctgatttatcttctgagacagggtcttgctctgtcacccaagctggagtgcaatggcacgatcttggttcactgcacctctgttacctgagcttaagcgatcctcccacctcagcctcccgagtagctgggactacaggtgtgcaccaccatgcccggcctttttttgggtatttttattagagatagggtttcgccatgctggccaggctggtctcggactcctcagcttaaaagcaatctgctgcttgccctccaagtgctgggatttagggtgagcactgtgcttgtgtattn

SEQ ID NO: 37207 - DNA, 407 bp, Homo sapiens
cccacgcgtccgcagacccgtggggcaaacggactggggccaagagccgggagcgcgggcgcaaaggcaccagggcccgcccagggcgccgcgcagcacggccttgggggttctgcgggccttcgggtgcgcgtctcgcctctagccatggggtccgcagcgttggagatcctgggcctggtgctgtgcctggtgggctgggggggtctgatcctggcgtgcgggctgcccatgtggcaggtgaccgccttcctggaccacaacatcgtgacggcgcagaccacctggaaggggctgtggatgtcgtgcgtggtgcaaagcaccgggcacatgcagtgcaaagtgtacgactcggtgctggctctgaacaccgaagtgcaggcggggcgggcgctcaccgtgagcgc

SEQ ID NO: 37208 - DNA, 402 bp, Homo sapiens
caattttgttcgtacttttcttaccacatatcgttcattttgtaaaccacaggaattgctgagcttactgattgaacggtttgaaattccagagccagaacctactgacgcagacaaattggcaatagagaaaggcgagcagccaatcagtgcagaccttaaaagatttcgcaaggaatatgtccaaccagtacaacttaggtttggcttgaatattttttatatatatatatacacatatatatatacacacacacacatattttatgtgtcagttttcaatatatagttaacacaaaagctctcagcttttaattcaaatatagggaatatttttaacttcacagcagttaagttaaactaaaagagttctttctcagtgaagctattcttaaataccct

SEQ ID NO: 37209 - DNA, 412 bp, Homo sapiens
acaacgtgtcctggagagacagcacaatgggctctatcttcatcacacaactcatcacatgcttccagaaatattcttggtgctgccacctagaggaagtatttcggaaggtaagtgtctcttttctagttactcatttatttcttcaggaagaatttgtcatgattcactttttacttcacaatgacaatttttgtcagggaagtgaaagtagagaggtacccagtttctgtcattcagttgtttaaaatatggctaaggaaaagacaattccaatatatcccagcagaagatcaaagtaaaataaaataatatcaaccataagctttatgttatggagcgtaagttcttaagttttagagaaggaaaattatttcttaatttattaaatgaataaaatctgggtggtctg

SEQ ID NO: 37210 - DNA, 459 bp, Homo sapiens
  misc_feature (1)...(459): n = A,T,C or G
nattgatcnccatgcggaaccatggatgacatccggaacgacccacgcgtacgcccacgcgtcccgcctcaggactggactccttggggtagcaaagacccttccttctttccttccctagctctgccttgcaaaggtgcagcctcctgagcctcagagtgtctgacatctctctgcctgggcaccctctctgaaacattgtgtgggcttagaaaccgtgagccttgggaaggaccatcttcctctgagctctgggcgtgttgaactgcggaggcttaccacttcctcgcctgtggtcatctccagcctgacccatggnggcgtgatcctctctcatcatccgncacaggttttaataaagaaaatatgttccagaaaggccgagtccccatgccgcatcaggtcagtgatccaagtgcattatagtgaaagtcagaggagatagctgctnttaggacg

SEQ ID NO: 37211 - DNA, 405 bp, Homo sapiens
atcagtgggctggaaattcctccaaattaaatataaataccagtagcagctcccctgtgtccagccagtttctcaaatgctgtccacctggtcttactgtccacctaacataacttggaggctttggctggctcaaccacctgttcactttattttgttttcatttccatttgaacttgaagtgaggctatggaaaggtggaaatcatgggcaaggtttggaggctgcaattctagggcatagcttgtcaggagtttatattatctaaaatatatctttctataccccttttcattttaatctgttgccctgattataatttctttatatttgcggctatttttataagaatagagtccatttgctatgtctatttgagtactttttttctattgtccccacatg

SEQ ID NO: 37212 - DNA, 417 bp, Homo sapiens
cccacgcgtccgaagaccctcgagtcttccatccagggcctccggataatgtgaagctgagtgagcctccgccatccagcatgacaaactgtggccgaccgcagctgtgccgtggcacgatggcgaggaagccagccccaaggaaacactgaaaacacatatcacgccaatgccgtgtggttttgtttgaatataaaattggtgaaagtgttggtttttttaaggcagaaattattttgtttgtttttttgcgatttcattccattcttgaccaaagcttctctttaagtagtttattatggaaaattgtcacactaacttaaaagacagggtgagggagatatgtaaattgtccactagaaaattaaataaaagaactgaatgtgaaaaaaaaaaaaaaaaggggcggccgttctg

SEQ ID NO: 37213 - DNA, 380 bp, Homo sapiens
  misc_feature (1)...(380): n = A,T,C or G
tcccgatcacctttcaggtgaaggtcacggccacagagtgcatccaggagcagtcgtttgtcatccgggcgctgggcttcacggacatagtgaccgtgcaggtccttccccagtgtgagtgccggtgccgggaccagagcagagaccgcagcctctgccatggcaagggcttcttggagtgcggcatctgcaggtgtgacactggctacattgggaaaaactgtgagtgccagacacagggccggagcagccatgagctggaaggaagctgccggaaggacaacaactccatcatctgctcaaggctgggggactgtgtctgcgggcagtgcctgtgccacaccagcgacgtccccggcaagctgatatacgggcagtan

SEQ ID NO: 37214 - DNA, 429 bp, Homo sapiens
gaagaccaggaggagctcttcgtagtccagaaaggtagaagcgggagttgtttacttaattttactgtcataccatgctattacctacactcctgtgtgcagcgggcattcagtaaatgtgtgttgaaggactgggacgtacgtggaggctgctggacctggtcagagactgatgtgccttagcggcaatggctagagcttttcagtgcatcccacctccctgtcgcccccatgctcggcttcctcacattcaggagcctgacttggatcagacttgaggctgcacagtggagcaggtgggttcccatgtcattattaataaggagagggttgggggggggcaaggctccataaagtcagcagtgtgcctgggcacccaccccatcctctacctgccacacctgagagggttcctacagctgcacacaa

SEQ ID NO: 37215 - DNA, 193 bp, Homo sapiens
cttttggaagagttagaagaatttggaagatagaaacaagatagaaaatgaaaatattgtcaagagtttcattttctatctgaaactcttgacaatattttcattttctatcttgtcaagagtttcagatagaaaatgaaaaacaagctaagacaagtattggagaagtataaaagaaaaaaaaaaaaaaagg

SEQ ID NO: 37216 - DNA, 414 bp, Homo sapiens
gattcggctatcccagtgacaacgatagcccagcccaccatcctcaccaccacagccaccctgccagctgttgtcacggtcaccaccagcgccagcggctccaagaccaccgtcatctctgctgtgggcaccattgtgaagaaggccaagcagtgacctgaggggccaccctaggacttgaaaggaccgtgcagcccagtgaccactgcccagtgggaggcgccactttgtatatttcaggactgggacctactccccagatgccacctgagaggagcttctgtttggcattccagatggaaggacaggcagcacgggagccaggcgctgtggacagggtctgtccacgcaccacctggggtctgccgcctattaaaagtgccgtattcttaaaaaaaaaaaaaaagggcggcc

SEQ ID NO: 37217 - DNA, 402 bp, Homo sapiens
cctgaatccctgcggtcccagcgtcgctccggacgctgccaacctgttctccaccgtcgctcgacttccacctctaagactcccacgaaactcaggttgaataattcatcaaattacacaactgaactcaagacatggctgcccagtgtgtcacaaaggtggcgctgaatgtttcctgtgccaatcttttggataaagatatagggtcaaagtcagaccctttatgtgtgttatttttgaatacaagtggtcaacagtggtatgaggttgagcgcacagaaaggattaagaattgcttgaatccccaattttccaagacatttattattgattactactttgaagtggttcagaaattgaaatttggggtttatgacatcgacaacaaaactattgagctga

SEQ ID NO: 37218 - DNA, 413 bp, Homo sapiens
  misc_feature (1)...(413): n = A,T,C or G
cggacgcgtgggttaaaactttccatataaaattaactaaaaatctggaagtggaatttaagcttttaatgtgtagcaattttgaaaatatagcagaggtatattttcaagggaggtgtgaaatggaggtattattgtttgtattttattttagaaattttgtttgaacttgcccaagatcacacagcaagtgtcagatcctaggttacagcccataatttttcacttgtttcatcttttgttaccatgtttgttgtttaatccaatggggaagtgtttttatagctttattttcatggagatagtaacattgatataatgggatctagaatttacttagagtcaaagtgactagatttaattacaaaaagtattttgttgtataccgttatacactcattaacataggggtn

SEQ ID NO: 37219 - DNA, 403 bp, Homo sapiens
agcaccagctcattaagcaccaccacggtagaagcacagaaacatcccaaatgtaaagtctgcttgcgcactcggcttttgaactgggcattgatatgctgatagaaaaatactgggcattgggttctagtggggaagataatgtaggcctagagatggggaaggcgggaatagagtgcaaaggaaaaactatgcctcatctttttgcaaatagctccttgtagtaattggtcaagttcgagttacatgtttgaaatgtggaataacatatgtaattgctacttgctactacaagagctcacccttaggcgcagctttactttccgtggtttgagatacccacagtcagtcacggtcagaaaataggagagtatgatgtagtaagatattttgagagtgcgag

SEQ ID NO: 37220 - DNA, 455 bp, Homo sapiens
  misc_feature (1)...(455): n = A,T,C or G
aatgaagccatgaggtctcccgaangcccggatacccggtcgacccgcgcgttcgcccacgcgttcgccagcctataactactggtaaagcaccttcacctcgagctgcccatgcctgtgccactgtcggaaatagaggcttcgtgtttggaggcctatatcgagatgctagaatgaaagatcttcactatcttaatctggatacatgggagtggaatgaattaattccacaaggcatatgcccagttggacgatcttggcactcactaacaccagtttcttcagatcatctttttctctttggaggatttaccactgataaacagccactatgtgatgcctggacttactgcatcagtaaaaatgaatggatacaatttaatcatccatataccgaaaaaccaaggttatggcacacagcttgtgccagcgatgaaggagaagtaattgttttg

SEQ ID NO: 37221 - DNA, 406 bp, Homo sapiens
  misc_feature (1)...(406): n = A,T,C or G
ttccaaacaaaatgatgaactttgatttgaacaggtgcatttaaacaaccggaaatgatcacttataaaattcaattaaaatgctgttgttttgtaatgaggatttttcttctgatttcaaattccatgaactcctattgaaaacaaacaatgtacaggtaatatatgcacattgtagaaatgcaggaattatctattggaattaccctaaagatagaaattttatctatttgcttataaaattgattcagaaggttattaccttaatgtagttattactgaattgccaggaaatgagtggagacagagctttaagataaaggatactaaaaacagctaagaactccaggactcaggtcaaatcaaggaactgataataagatcattgaactgtataaattaagtn

SEQ ID NO: 37222 - DNA, 454 bp, Homo sapiens
  misc_feature (1)...(454): n = A,T,C or G
atgagaatgactttcatttttagtatacttaagtacattttcaattttcaattatatgcagtgattttgtcctttaaaaaataggatggacttttttaaatataaggaagacattttctgtgaaacaataaattactcagtatatacttaatgtgcatgaagtatgaggtaggaatacatccactgacattcttgcatttgcataccacttccccaaatatgaactcacttctctgactttgctagggctgaggaatcatcattacaatatctgtaaaactggatttattaagtgcatccatattgtttatgagtcatagaaaatatgttcattttcctatccatgttaaaggctgcttggaggattgacggagcattgcttataaaatgttctggaattcagatgaagctgtgttagtataaatcattactgggtaccatatactcacacatn

SEQ ID NO: 37223 - DNA, 412 bp, Homo sapiens
  misc_feature (1)...(412): n = A,T,C or G
aatcaaggcacttaaaaggctaaccacgggcaagcagcatctgccctcagtgttggcagctgatgactccgtggggcatgtaaccatgagcatccgttgtgcacctgttatgcgtgaggctcgaaggctaattctggacaagtattagctcttttaatcctcagaactgtatgacacagatactgttattttacccacgaaactgaggcttaagagacttcttcaaaccttttcaagttgccccagagtccagtcccctacctctgggtccctttcagcagatggccttgtctcctactcgatgggggaaacagaagcctttggagagaaataccttcacgtccctgcacgatctagctgcacgcacactcattccatcctgccatcttcctggtactgaagagccagcccn

SEQ ID NO: 37224 - DNA, 401 bp, Homo sapiens
ttcagtggaggagaccgcaagttgagtggaggaggcggcggtggggccccggaccaggtgcctccatgggaggctatgaagagctggggctccgggaagacacgctgaggggcctagctgccttccttaggcgtggtgaggctgccgggtctcctgttccaactccacctagaagccctgcccaagaagagccaacagacttcctgagccgccttcgaagatgtcttccctgctccctggggcgaggagcagccccctctgagtcccctcggccttgctctctgcccatccgcccctgctatggtttagagcctggcccagctactccagacttctatgctttggtggcccagcggctggaacagctggtccaagagcagctgaaatctccgcccagccca

SEQ ID NO: 37225 - DNA, 407 bp, Homo sapiens
cggtagaacaaacatatatctacagactgtgattatacttcataagcatttaaatacagttttatttatttccttaaatatattacttgggtaattaattttagatttgattgctaagagcactgtatagcagttgggaccagctcttggcttggcttggcttggcttattgttatgagtttattggatcaagactaacaaataactttgtgatgaaaattcttcaaaaatatagctactcttttcaagtataccatttaaaatatttcatcaggcagagccctgaccaggagatatattgattcggagggaatgaaggtaatgaattttttcaggggctccaaaacgggttttcaggtactttccctgcccctggggggaggaaaaatacttttttaactggcttt

SEQ ID NO: 37226 - DNA, 469 bp, Homo sapiens
  misc_feature (1)...(469): n = A,T,C or G
cccacgcgtncggttgaggacgaaaacagtccccattgcgtgtagcagctctttccaaaaactcggctctgtagggggatggagcaggtgaaactggagggggccaggagaggctgtgattctttattgtttcagagatgagagaatctagagcatgtctgaatgctgatgcttgttgagacaatatagaaaagagagagagattggtggggtggggtggggatagttgtacctgatagaacaaggaatatctctgaggaggtgtggatggattggcttttgaaagaaagggaaacttggccaggcgtggtagctcacgcctgtaaatcccatcactttgggaggccgaggcgtgcggatcacaaggtcaggagttcgagaccagcctggccaacaaagtgaaaccctgtctctactaaaaatacaaaaaattacccgggctaggtggcgggtgcctgtactccctgcn

SEQ ID NO: 37227 - DNA, 419 bp, Homo sapiens
gtgtggcaggtaagggaaatgaggtatctgggaaggcttgagtgtaggcaaatttattcatcccaagtcaaactcttgatctctctcacgaaaactatgaccccccctggttgcccctgacctctcaatgttggaacaagccacaaccgtggagttatccttgatgactccccattcattatcccttctgtcccaccaccacagctgtcatctgttcaccagaacgttcttttggttacactccatgtgacatcctgaggctgttgcttctctccagcttttctgttaccatcctggtcctggctactgtcacctagtgggccactataatatggcttcctaatggatcttcctgcttcctctgttgcctcattacttttctatatagcagaatgatcttttgaaaatgtgaaccagaa

SEQ ID NO: 37228 - DNA, 463 bp, Homo sapiens
  misc_feature (1)...(463): n = A,T,C or G
gcgccctgaaaacacacacagacacacaacacacacacatacacacccctgaacacacacacagacacacatacacccatgatgggagcaaacacacacacgtgcgccttcatagcccagccaagggcatgcaggcagggagtgctgcctgagatggcacctccctttcagccattctataagaatgggccacacacagctagaagtcctctcccagctagaagacctgtccccactctcctggcctgacaagatgagctctcctgggaccttgctctagggcactctgcctctaccctaggacactggaatgccctgggagccccctccctgcaaccagcctgagttcagccccacggacaaagggacacacagcccccaatggagaccatngtaagtggtggggctgcgagaggaggaacagaagganagccatagcgctctcttgccccttgcatgtacc

SEQ ID NO: 37229 - DNA, 399 bp, Homo sapiens
aaaactgaaaagtcattaaggagttcaactaatcaggaattaaatggtcatttatttcatgcagtatgatttaaggtatttcttgagattctggtcaaatgtcataatcagcaaacgggattaaaaaaaaaactccaaaatcactaaataattatctaaataatggtattggagaacttgtttcctgctatttggaagagattgttgcttcattgctagtttgtatttctaacttctacagttatagactccactgtgctttgtgtctgaatttctcagtatagacattttgtttactgtatgcttgcatatttattttcaactttgcctgtctttaaaattgcttgaggaaaaatggttgtaattaatttctgctacagaaaagccacctggtacgtt

SEQ ID NO: 37230 - DNA, 397 bp, Homo sapiens
  misc_feature (1)...(397): n = A,T,C or G
caaggagtacaccagcctgggtgccctcaagatgcacatccgcactcacacgctgccctgcacctgcaagatctgtggcaaggccttctccaggccctggttactgcagggccatgtccgcacccacacaggggagaagccctatgcctgctcgcactgcagcagggcctttgccgaccgctccaaccttcgggcccatctgcaaacgcactcagacgccaagaagtaccggtgccggcgctgcaccaagaccttctcccgcatgtccctcctggcgcggcatgaggagtctggctgctgcccgggcccctgagaggcacgtggtcggcgcaagtaggagggatggtcctcaccgggagagctggcgtccctcctgcccccagaggagccaggagtn

SEQ ID NO: 37231 - DNA, 420 bp, Homo sapiens
ctcttgttgcccacgctggagtgcaatggctcgatcttggctcaccacaagctccaactacaggattcaagcgggtctcctgtctcagcctcctgagtagctgggattacaggcatgtgccaccacgcccgactaatttttgcgtttttagtacagacagggtttcaccatgttggtcaggctggtctcgaactcctgacctcaggtgatccacccgcccggactcccaaagtgctgggattataggtgtgagccaccaagcctggcctataacagaaaattctaaatatttagaaaatactttcaatttgtaggtttcttaattttactactgggttctactaaatcaaaaattggtggtggcaattagattttcaggtgggggcaacaatattttatgccactaaatatttggaatta

SEQ ID NO: 37232 - DNA, 418 bp, Homo sapiens
cggacgcgtggggatgactgtgatgcctgcgcaccttgagaaccatcggcctggatagcatctgaacactgatggctcctggtgcgtctagagaagacacaggccatgtctgggacgcgggggagatggactagcacgctcccccagccacagggcagcatgatgcccagttccctcagaaggatgtccttcatcttttccttgccgtgtgtgttcaaccccaccctctcagcagcccgggaagggcaggacactgcacacacaagagggccgttcccagtcccattccagattcatctgtcaccagacccacgggaggaggcagactggttccaggaggatgacagcccttgttctgacacctgtgtctgataccagggcctacaaatccgcactggactacaccaaacgaagtctg

SEQ ID NO: 37233 - DNA, 292 bp, Homo sapiens
aggaagagcaaccagttactatgagtgaaagggagccagaagactgattggagggccctatcttgtgagtggggcatctgttggactttccacctggtcatatactctgcagctgttagaatgtgcaagcacttggggacagcatgagcttgctgttgtacacagggtatttctagaagcagaaatagactgggaagatgcacaaccaaggggttacaggcatcgcccatgctcctcacctgtattttataatcagaaataaattgcttttaaagaaaaaaaaaaaaaaagg

SEQ ID NO: 37234 - DNA, 399 bp, Homo sapiens
atgtagatcgcgagcggtcatccttactgtctattaagtaaaaagtataaaccatatactatttttaaaacaggtaggttagatttaaatcacgtagtttagaactgttggaatggtactttgagagataggatttatgttaggccttctttagtaatagttaatatcatgtgattagcactcgtttacacacaattttaatgtgttcgaatccctagagtcatcgaattcagaatttatagtattttattttacttagttaatattaacctaaaaaaaaagcaaaatacaggcattatgcagttgagttgtgttaagtgtggactgtaaaacaggatagtatttgttataaaatatgtttttgtatgtgtttaatatatagcttcaaaaggacatgta

SEQ ID NO: 37235 - DNA, 419 bp, Homo sapiens
atgaaaaaaagcctagtcagactcccatccaaagtaggaactatctctttaacattcttgactcactatcactttacctcaaattgaacagattccatgacggaacttcattcttcacaaactagccagtgacatgtgggacagctctggccagggctctgggactgcagtgtacttgcgctctgcacggtccaggagctgtgatgtggctgtggtctaggggaatcctgcctgccccatggagttgcgcagcacaaccctggcttcaattgccagaaggctctttttaatgctgaaccaaaatgtgccttttttttttttttttgaaaagggatttccctttttgtaccccagcttgaatggaaggggggcaatttaatttaattgaggccattgcttccaaggttaagggaatcccg

SEQ ID NO: 37236 - DNA, 480 bp, Homo sapiens
  misc_feature (1)...(480): n = A,T,C or G
aagcacacgccttcagagtcccagcaaagaanataaaaagaaagacaaagatatgcttgaagataagtttaaaagcaataatttagagagagagcaggagcagcttgaccgcatcgtgaaggaatctggaggaaagctgaccaggcggcttgtgaacagtcagtgcgaatttgaaagaagaaaaccagatggaacaacgacgttgggacttctccatcctgtggatcccattgtaggagagccaggctactgccctgtgagactgggaatgacaactggaagacttcagtctggagtgaatactttgcaggggttcanagaggataaaaggaacaaagtcactccagcgttatatttgaattatgggccctacagttcttatgcaccgcattatgactccacatttgcaaatatcagcaaggatgattctgatttaatctattcaacctatggggaagactctgatcttncaagtgattn

SEQ ID NO: 37237 - DNA, 401 bp, Homo sapiens
tgccggaggcgcgcagacgggacgccacgccgccggtgtcccccatcaacatggaagaccaagagcgcatcaaagtggagcgcaagcggctgcggaaccggctggcggccaccaagtgccggaagcggaagctggagcgcatcgcgcgcctggaggacaaggtgaagacgctcaaggccgagaacgcggggctgtcgagtaccgccggcctcctccgggagcaggtggcccagctcaaacagaaggtcatgacccacgtcagcaacggctgtcagctgctgcttggggtcaagggacacgccttctgaacgtcccctgcccctttacggacaccccctcgcttggacggctgggcacacgcctcccactggggtccagggagcaggcggtgggcacccacc

SEQ ID NO: 37238 - DNA, 423 bp, Homo sapiens
caatggagaacattaagggtttcaatatatgtgaattttccataaagtgaagtttaaaaagtaaacttttaccactgaaaacttgaaaagcttttcaaagaatttagccacttgtggatcattctcttcatgagatccactatatgttttgagctctctctggaggggactaaatgcaatttaatgttcccttaatttctcagtattactcatggatacatattatagaatttttctataatgcagtaatacattgcatggtatataaggctattaattcttagatcaaatggtcacataatcactgtttattttttattttttattttttatttttatttttttgagatggagtcttgctctgtcgcccaggctggagtgcaatggcatgctcttggctcactgcaacctccacctcctgga

SEQ ID NO: 37239 - DNA, 477 bp, Homo sapiens
  misc_feature (1)...(477): n = A,T,C or G
acgcgcccccattgatgacatcgtgcggacccgcnccggaanncccgggtcgaccgacgcgtccgggaccatcgaacagagctcgcctcccctgattctttcccaaactcatcgacaggaccgagtccgtaaaccgctccatagagaagagtagcagcgtgaagaaatcccagccagacttgcccatctccaagattgatcagtggctggaacaatacacccaggccatcgagaccgctggccggacccccaagctagcccgccaggcctccatagagctgcccagcatggctgtggccagtaccaagagtcggcgggagacgggtgaggtacaggctcagtctgcggccaagactccgtcctgcaaggatattgtggctggagacatgagcaagataagcctctgggagcagaagggaggctccaagacctcatcaacaattaagagcaccccatctgggaagaggtataagtttg

SEQ ID NO: 37240 - DNA, 417 bp, Homo sapiens
cccacgcgtccggtggaaactccagtcaacgcaagaaggaatatttaagttgctgcaaacatgtttgaaaaccaggggaacatggaaggtggggttctgtaacactgaaaccaagtctctacccacagttggaaatgagatttgttgagtttattttatggctcaatgtatgactcgcctttccagttttattgtgttaaagacactgctatgcaagcttcactgctagttcttggtagcagttgtgaattttttctctggagattttaaagaacagaatggagctagaaaaaggaaataattagttctaaaataaaaaaataaagtgagatgtaaagctgcaaattcacttactttttggttaaaaaaaaataaaggtggggagagagagagagagagagagagagagcgagtgag

SEQ ID NO: 37241 - DNA, 404 bp, Homo sapiens
aaccccccttaatgccatccttcattgtctttctggcttctcttcttctggcacagtaccattttgggtctgtgccccagtgtggagcaaaacattgcctgtcccattctgatatacttcagaatttgagagcagaagttaatgtggaacaaaagttttcaccatctctcaagccccaaggactggagccacctctggaataatgtgttaaatatctgtatattatatatatgtagagaaaaatctaattttttggtttgatttccttcccattaagaatcttgttttttgatacccttgtctccctgagactctttcttggacacgtgttgatgtggatggcactcctgctctccatcttttatgggcagagagatttcaaaacctgagcaggatcatgtctg

SEQ ID NO: 37242 - DNA, 454 bp, Homo sapiens
taagtttgtttaaacacttatcttctggattagaatgccggttaaattccatatgctccaggatctttgactgaaaaaaaaaaagaagaagaagaaggagagcaagaaggaaagatttgtgaactggaagaaagcaacaaagattgagaagccatgtactcaagtaccaccaagggatctgccattgggaccctccagggctggatttgatgagttaactgtgaaataccacaagcctgagaactgaattttgggacttctacccagatggaaaaataacaactatttttgttgttgttgtttggaaatgcctcttaaataatatatttattttattctatggaggtaaattaatttagtttttaacaatctaacaataatatttcaagtgcctagactgttactttggcaatttcctggccctccactcctcatccccacaatctggcttagg

SEQ ID NO: 37243 - DNA, 438 bp, Homo sapiens
  misc_feature (1)...(438): n = A,T,C or G
cccagctctggaacattttcaatcaagttaccatgcactcccaagatgtacgacatcatcgcttctgtctccgtttgatgctgaaaaacccagaaaatcatgccctatgtgtcttaaatggacacaatgcatttgtatctggtagttttaagcatgcgcttggacagtatgtgcaagcctttcgcactcaccctgacgaacctctctatagcttctgtataggcctaacctttattcatatggcatctcagaagtatgtgttacggagacatgctcttattgtacagggcttttcctttcttaatcgatacctcagtttacgtgggccctgccaggaatcattctacaatttgggccgtggccttcatcagttggggctgattcatcttgcaatccactattatcagaaggccctggagctccctccacttgtggaan

SEQ ID NO: 37244 - DNA, 450 bp, Homo sapiens
agtgtgttactagagaagtttctctgaacgtgtatagcaccgaaaaccacgaggaagagaggtagcgttttctcctgagcgtgaagccggctttctggcgttgcttggctgcaactgccgtcagccattgatgatcgttcttctctccgtattggggagtgagagggagagaacgcggtctgagtggaaagaaaaaaaaataaaaaaaaaaaaataaaaactaaaaaacccaaaaaaaaaaaaaaaaaaattttaaaccgtcgggcaaagtaataaacccttatttggtgttgtcgtttagacagaccccggaaaaaaaaaacccggctggattcgaacgatggaaaattaatggagggtgtaatcttctgaccaccaaacatttaggtggcctggactgtacttttggaaattcctgcccttccttctttttcccgaaaattatttttt

SEQ ID NO: 37245 - DNA, 475 bp, Homo sapiens
  misc_feature (1)...(475): n = A,T,C or G
cgggtggtgnnaaactgaggcatgagatgagcccgtaaganccggctcgacccacgcgtccggacccacgcgtccgcggacgcgtgggtccagaagtcggaggccatcctgcgggagctggacgtggaaaatgccaagctgtacctggacttcatcgtactcgggattttcttcatctccctccgcctcattgcctattttgtcctcaggtacaaaatccgggcagagaggtaaaacacctgaatgccaggaaacaggaagattagacactgtggccgagggcacgtctagaatcgaggaggcaagcctgtgcccgaccgacgacacagagactcttctgatccaacccctagaaccgcgttgggtttgtgggtgtctcgtgctcagccactctgcccagctgggttggatcttctctccattcccctttctagctttaactaggaagatgtacgcagattggtggttttttttn

SEQ ID NO: 37246 - DNA, 405 bp, Homo sapiens
ggaggcggaggttacagtgagccgagatcgtgccattccactccagcttggacaacaagagcaaaactccgtttattaaaaaaaaaaaaaaaaaaaaaagggggggtctgttttggggttggttttttggggccaaggccaaaggggggttttttttgatgtttaaaaaacctaaagggggcttttttttaaggtgtggaaatttttttgcgggggaccgttttttgggggcggggtttttgccaacaaaaaaacccccctgttttttgggtttttggggaaaaaaaaatttgttaggggtggacttttttaaccaccttaatttttttttttttttggcgttgcgaaaaaaaaaaaaaaacataattttttttttttaccattgctttaacaatttggcccatt

SEQ ID NO: 37247 - DNA, 417 bp, Homo sapiens
agctttcctgtgatttctgtttcacgttccttcctgtcacaccctcctttggcgtctctgtgtatatccttgctttattttcttggaacctttgatttcaacactgagggcctggagacctcggctcctcctgctcctgaaccaggaggcttcatgtgggggaggaggagaggtctccatgtgacacatgggctcagggctgccagaatcagcggatgctggatgggcctgcagaaacaacactcaccacacacacttccttcaaaagaccaaaagtgactggtgtctcgtgtgacagattgcttcatttatgtttctacatagtaaggtgactgccaaataatatttgaagtcatctgtctctttgtaaattattttatatgacctataaatttaaaaatgtttttcagtgagtgc

SEQ ID NO: 37248 - DNA, 418 bp, Homo sapiens
agaaagccaaggcctatgcagccaacagccaccaggggcagatgctggcccagtatatagagagcttcacccagggctccatcgaggcccacaagaggggctcccgcttctggatccaggacaaaggccccatcgtggagagttacatcgggttcatcgagagctaccgcgacccctttggttcccgaggagaatttgaaggtttcgtagctgtggtgaacaaggccatgagtgccaagtttgagcggctggtggcgagcgcaaagcagctgctgaaggagctgccctggcccccaacctttgagaaggacaagttcctcacccctgacttcacctccctggatgttctcaccttcgctggctccggcatccctgccggcatcaacatccccaactacgatgatctgaggcagacggg

SEQ ID NO: 37249 - DNA, 430 bp, Homo sapiens
aaaacatcattcatttatttactatattgtctttcactcaactccagttatgcactaaatattctcctctcattcaccaagagtgattgaaacaccatctttcaggtagagaatcagactgctccaagcaatggcaacagaacttggaacagaagcgagagagtgtcactttcacttctggtagggtggttcccaggcgactgcaggtcttgtgaaagacaggggtctcaaagttctgttaatttcacaaatttgttataaatttgtctaaactgagctgttgtggcaacataatttatgaatcgtaagggctagttaggcttattggggggatatctacatatatatgtgtatgtaaaggaaaaaaggtagaatttacagccttcaaaaaagaaaaatcatattccaagcacaggaataagaaagctat

SEQ ID NO: 37250 - DNA, 428 bp, Homo sapiens
gagtcactgaatgttttgtccttcctttatactaatgatagtgctttagaatgagaattatgcctgaaatctggcaaaccgaaaaatgttgctattgcaacaaagtggcaaaagctaaaagtaaggatttatcttcaaacataagctgagataacgaatagaagcaaaacgattggctactagctctctctctctctctctattaggtaaatttgaaaaataaaaatgacttggcacttttaaaggtaacttcaccaaagaccgaagagccagtaaccagtagctccaacttgtctcagcatcacatcttctgtgctctttatttttgccggaccagtttgcggttaggagaatgtgccttttttgtacctttgcatttaggttttataattttaattgatgtatggacacacacaaacaaaaaagct

SEQ ID NO: 37251 - DNA, 426 bp, Homo sapiens
  misc_feature (1)...(426): n = A,T,C or G
ccaactcctgacctcaggtcatccacccacctccgccaccgtgcccggccgaaatttgtgattttataactaagaatttttagttaagaacattatcagtaaagacaacgtaatcccaccctggagagtttattgggagcccaggaatattcatttttaatacacacacacacacacacacacacacacacacacacacactgatcagagtaacgggagtttctctcaggagtcatactccatgagcctggacccagtggttctttatgtggaaacaaatttcacctataggtaacctggtaactgctatttttttgtgtgcgctctgtcaacaaaggtatcagtggcttgcaagagatgcctttaatactcagagcattctatctccccctatctggtatagaaggagggtctttattagatacn

SEQ ID NO: 37252 - DNA, 420 bp, Homo sapiens
cccacgcgtccgcccacgcgtccgtccacgcgttcgtccacgcgtccgggcttgtccacagtgggcatgggatctgggccagtatcgcaagctcagtacagcctgccaggccgagtgggtggagccagctcatcagtcaaaagtgaaactcaggcagaggcaccactggccacagaggttaccgaaagaatcgtgtgtcactactgttagcggtgcctaatttatacaggtctgcagcaacttcagttcttgccttctaagaagagagaattcaactgaggtgggtcataaagcagagtcagagactgaggcaagttttaagcaggaatgaaagtttattaaaaagttttaagtaggaatgagaggaagtaaagtacacttggaagagggccaagcaggtgatgtgagagagtcaagtgc

SEQ ID NO: 37253 - DNA, 412 bp, Homo sapiens
cagatcgatatcaagatgaaacaatttttatatgaatataccttgaaataaatcaaaacgattttacttgtaaaaatcttgtctgctcaaatttctacttagagtcagtattcctttttaataatgactaatttttttagaccctggaacatgacagtctttttccttccattctgattgaatcatgcttttacctaagcttttctttaattttgtcatttttattactgtgaattaatatatatcaaaatgtttttatatttatggtaatgacttaatctgtttgaacaagtgtctcttactgtacattttctccctaattcctatggcattaatggcattaatgaccaaagaataatttggcttacaaaaaagtcagggctccccattaaaatcacccttattattttaa

SEQ ID NO: 37254 - DNA, 415 bp, Homo sapiens
atggaatcactgttaattggtcccctaaggggatgtttagcttaaattgcacctctcagcctgcgtgccacggccacactatgtgcagctggtctgaacaaaacggtcagatggtagaaacaataagaagtatggcaaaagttcctattatctggaaccatgctggtatagtggcacctcaacctcaaacgataaggcccgctgtaggagctaaacattaaggatttgtagaaactattaatagctcttaataagatcaaaattggggaaagaataaagcatctagaaggacactctacaagctttttggatacagtaaaattaaaagaaaaaatatttaaagcatcccaggcacacctgaccttaataccagcaactggagtgcttaaaggaactgcagacagatttgcagctt

SEQ ID NO: 37255 - DNA, 426 bp, Homo sapiens
  misc_feature (1)...(426): n = A,T,C or G
cggacgcgtgggcggacgcgtgggctggaaaaagtttacttgtgttgttatctcgttgccggagtaagtagacataagacagagtttaagaagtaaaaatatagaaaaattttgatggtcacaatgagataaatattacaatattactattccaatgattaaatgaggatcttgaaataaattctgaagtcttccaatttttacatttattggaggggtccctgagttctgtcaacttttttatttaagtctcttgctcttattttgtgcataaatgttaaaccttccaaaaatgaaatgttagctttctttcttttactttttattaaatttaatagaaaatatgacctgagtagttaaaaagtattttgcattatttgcagtaagatgtctctagcactgctcaaagggcanattttataactt

SEQ ID NO: 37256 - DNA, 448 bp, Homo sapiens
  misc_feature (1)...(448): n = A,T,C or G
caaatcattaaatttctaacaattaacttttggaaaatttttgttcttaataggaacaggagtacagctgtgtagtaaagatgccttctggtgaatttgcacgtatatgccgagatctcagccatattggagatgctgttgtaatttcctgtgcaaaagacggagtgaaattttctgcaagtggagaacttggaaatggaaacattaaattgtcacagacaagtaatgtcgataaagaggaggaagctgttaccatagagatgaatgaaccagttcaactaacttttgcactgaggtacctgaacttctttacaaaagccactccactctcttcaacggtgacactcagtatgtctgcagatgtaccccttgttgtagagtataaaattgcggatatgggacacttaaaatactacttggctcccaagatcgaggatgaagaaggatn

SEQ ID NO: 37257 - DNA, 438 bp, Homo sapiens
tactatttcattctttagttctgaatcttatttatgataaagtgtcagcttggggtccctctaccacatgtgtagtatgaatttagatctcacatctgtgaatggtgcaggactaggatccagtttcttccaggtaactttttccattcctagtcccaaatgcaaggctttctcttctcctagctagagagctgtttctacttcgcatttcatggatggagcagtcctttttgtttcttaatttatgctcagttccatcttgttttgggctgagtacatggcctgtggcctaaactcttttgtaactcctagcgattcaggtattcatgtgtatcatttgtcttcagctctggacttcagctctgtaatagccttttaaatgagctcctctgattccactcttgtacccctaataatccattcccaacacagtgatca

SEQ ID NO: 37258 - DNA, 518 bp, Homo sapiens
  misc_feature (1)...(518): n = A,T,C or G
cggcggaaagaaaattcttgaagacctncgatcgggagggcctccgaannnncacnaancnngcgganagttaaacagcggcagcagtagcagcagtaacagtattaacgagagagaatactttgattccacctcttcctcctcttccactcctcctttacaacccagggattcggcatccccttcaacctcgtccttctgcctgggggtttcagcggctgcttccagccacgtaccgatacagaagaagctgcgttttgaaaacaccctggagtttgtagggtttgatgcgaagatggctgaagaatcctcctcctcctcctcctcatcttcaccaactgctgcaacatctcagcagcagcaacttaaaaataagaggatattaatctcttctggggcttcggtgcatcatgcaaacggcctaaccaaatcttctaccaccggctctagctttgctaacagcaaacctggctctgctaagaggttagcgatcaaaaaacttaaaagattagcctaan

SEQ ID NO: 37259 - DNA, 457 bp, Homo sapiens
cccacgcgtccgttttgccatggtcacacttcggattctgttctagtctctctggtaatagtatgctgtaatcccagaagtttctatattttgaaatattacagagggactatactttagcctagatctataatttgacttcaggatatgctttaaatgccctttaagtgtatttttgttgtttacttttctgtttatagttgtttagaattgttctcattgaggcattgtgacattgcatactttagagcacttaatactacttttttttttttttttttaaaggaagggaaactggaattttgcccactttctttcaggtatgctacggaaggtttgggggcaaagggtttttacaaaaacaaaagggtttaaaccccgtttggaaattttaattaataatcgggccccaggggggagggcgtgaggtattccagtcttatatggggtatggctt

SEQ ID NO: 37260 - DNA, 480 bp, Homo sapiens
  misc_feature (1)...(480): n = A,T,C or G
caggaacgccttattagaggccctgaaanccgcgncgacccacgcgtccgcggacgcgtgggcggacgcgtgggattctcggtaagaatcagcatcaactctaaagagctctttgcaaaaggaagccacgaggcagggcctgtgtccacagctgctgtccagcactccagcttgcctcctgccactgccactggctgggcggcccatgtagggcagctgtgttccagggctggccctgggttgtcatgccctatgccacgtgagaacatacgtgtctgttttaggccaatgccataggccggggtgccaagtcagtgcgtgagttcctggagaagaactatactgacgaagccattgaaacagatgatctgaccattaagctgtgatcaaggcactcctggaagtaagtttgcatttggaatccaggcaaggtggtgaagataccacgttttggtggtgagtggaanganaataacaagg

SEQ ID NO: 37261 - DNA, 395 bp, Homo sapiens
  misc_feature (1)...(395): n = A,T,C or G
ttctgtcccggcagaggaagccagatcgctgagggttcgggcttcagtttgcctcctgctatatccattggaagagaaaagtttgtgacttgggcccccaagttttgagagaactgggctttcggcgcggggggacagaggaggctcgtggggagctttccccatggagcttacccagcctgcagaagacctcatccagacccagcagacccctgcctcagaacttggggaccctgaagaccccggagaggaggctgcagatggctcagacactggtggcctcagtctctttccctgcacccctgagcctgtgaatcctgaaccggatgccagtgtttcctctccacagggcagctccctgaagcactccactactctcaccaaccggcagcgan

SEQ ID NO: 37262 - DNA, 418 bp, Homo sapiens
  misc_feature (1)...(418): n = A,T,C or G
ctgactcagtatgtcacatttaacaagaggccagagcttgtccaaaatggctgtccaaaaacgaccccacacttgcgttagaagatgatacctttttcagggacagttttctctcttggctcctgtcccgctggccctctgtctgcctgtgtccctgaccatggctccctgcagtaccctttaacgatttatcagcaagactgttgaacgcataactgcccaagatgcctgtccctccccctccagcacccccgccgcccccgacgtttgcactggccaatacagagaagcctaccttgaataagacagagcaggctgggagaaatgctctcctttctgatatcagcaaagggaagaaactaaagaagacggtcaccaatgacagaagtgcaccaatactggacaaacctaaaggagn

SEQ ID NO: 37263 - DNA, 407 bp, Homo sapiens
agaattgctttaaaatcccactcatagattcaatgcaatcactatcataattccaatggcattttttacagaaatagaaaaaaattctaaaatttatgtggaaccacagaagacccaaaatagccagcaaaattcttgctcaattttgagcaataataaagctggaagcatcacactgcctgacttcaaaatatgctacaaagctatagtaatcaaaacagcatgacctcagcatgaaaacagacacattgaccaatggaacagggtagagtgcccagaaacaaatccacacgtttactgttagttgatctttgacaaagatgccaagaacctttgggggaaaggacagcctcttcaataaatggtaccagggaaactggatatccatatgcacaacgaaaccagac

SEQ ID NO: 37264 - DNA, 407 bp, Homo sapiens
caggtcccatggggtctctttgacaggcagattaagtcagctcgatgcccatggggtctctggaacatgaggggctggtaagcctgaggcctgtggggttgcaggaacaggaggggcccatgagcctggggcctgtggggtctgcaggcccagtggagacctctaaggggttgctggggcaggagggcctggtggaaattgccatggactcaccagagcaagaggggctggtgggtcccatggagatcaccatggggtctctggagaaggcagggcctgtgagcccaggatgtgtgaagctggcagggcaggagggcctggtggagatggtgctattgatggagccaggggcgatgcgcttcctgcagctctaccatgaggaccttttttgcggccttggagacgtt

SEQ ID NO: 37265 - DNA, 403 bp, Homo sapiens
taaaaataataagtaaattgataaagtaaaattagatgatgttacaagatattccaattgtaggaattgtttgcaccctcctactgaccgtgacagtaccttaattttttattcattatgccaccaagccattccattggaccacagtagcatttctgggtcgtagaaagcagcttatctatatttgttgaatgaatgaaatacacaatatataagcattagctttatggacaggctgctgcatatgcttgtgaaggttatgtactacataactccagagagcaccatttgcagaggccacgatgtatacaacctaccaaacaagactaggcagtatctgagaaggttcctcttaaggcagagggcggcaaagtttcatgagccaagttcatctcactgcctg

SEQ ID NO: 37266 - DNA, 515 bp, Homo sapiens
  misc_feature (1)...(515): n = A,T,C or G
tggaaacggggnaganaaaactgaaaccntcgganactggacngcctccggagncgacccacgcgtccgcgatgaccctgtcgccacttctgctgttcctgccaccgctgctgctgctgctggacgtccccacggcggcggtgcaggcgtcccctctgcaagcgttagacttctttgggaatgggccaccagttaactacaagacaggcaatctatacctgcgggggcccctgaagaagtccaatgcaccgcttgtcaatgtgaccctctactatgaagcactgtgcggtggctgccgagccttcctgatccgggagctcttcccaacatggctgttggtcatggagatcctcaatgtcacgctggtgccctacggaaacgcacaggaacaaaatgtcagtggcaggtgggagttcaagtgccagcatggagaagaggagtgcaaattcaacaaggtggaggcctgcgtgttggatgaacttgacatggagctagccttcctgaccattgtctgc

SEQ ID NO: 37267 - DNA, 416 bp, Homo sapiens
  misc_feature (1)...(416): n = A,T,C or G
agtacatcccctaagatgtctactataatagtcgtttaaggataaacaggcagataccaccaccttaaccaaatgattaacatctaagacacagcaacatcatgaattctcagatatgatgtgctgagaagagcacaacacacttaaaaatgcataatctcattctaatcatgaaaaaactcagacaagtccaggtgcagcggctcacgcctgtaatcccagtgctttgggaggctgaggcggatggatcacctgaggtcaggagaccagcctggccaacatgatgaaaccccatctctattaaaaatacaaaaaactagctgggcacgatggcaagcgcctgtaatcccagttatttgggaggctgaggcaggagaatcgcttgaacctgggagacagaagttgcagtgagccan

SEQ ID NO: 37268 - DNA, 398 bp, Homo sapiens
atggcggccccaccccaactaccacctcttttcaggcacagaccttgtgggactgggccccaggcctgcccaggatgtggttttccaagtcctgacccttggagccagaagtggcccctctgcccctccaggcccagggcatggtcctgctgcttcacccctcccctagcctgccgtgtggcactgcccacaggctggggacaagcagcccttgtgttgagtcaggttggccctgtctagggtggaacagaaggacagatggacccaggagggagggcagctgagtaactgggtaacttattggggctgggcatgcactggggggctggaggagctgggctggacccttcccacctgagcatgctgacccccttcctacctccagaataaagaatctc

SEQ ID NO: 37269 - DNA, 406 bp, Homo sapiens
tcggcggcggtggcggaggcgacctcgcgacctgtgtcagcagagccgccctgcaccaccatgtgcatcatcttctttaagtttgatcctcgccctgtttccaaaaacgcgtacaggctcatcttggcagccaacagggatgaattctacagccgaccctccaagttagctgacttctgggggaacaacaacgagatcctcagtgggctggacatggaggaaggcaaggaaggaggcacatggctgggcatcagcacacgtggcaagctggcagcactcaccaactacctgcagccgcagctggactggcaggcccgagggcgaggtgaacttgtcacccactttctgaccactgacgtggacagcttgtcctacctgaagaaggtctctatggagggccatctgt

SEQ ID NO: 37270 - DNA, 386 bp, Homo sapiens
ctcgaagctggctgtcttcatgtggctgatgacctatgttggcgctgcctttaacggaatcacccttctaagtcttgctgaactgctcattttcagggtcccgattgcctatgagaagcacaagacccagattgatcactatgttggcatcggccgagatcagaccaagcgaattgttgaagagatccaagcacaactccctggaatcgccaaaagaaaggcagaataagtacagcggaaaccagaaatgctacagttactaaaacaccattgaatagttataacgccgatacttgtactatgaaggaaaatactcagagccaggttgagcctgcattccaagctttctttttaatctggagtgttctcccatcctttccctttaa

SEQ ID NO: 37271 - DNA, 429 bp, Homo sapiens
  misc_feature (1)...(429): n = A,T,C or G
ctgacagattcttgggtgttatcaacgtttattatacacagatcctgagtttgggttgaggtctgagccttgaaagagaagggcatttgatgtggagcagggattatcttcaagtgatgagcactgaaatgtttggtctcttaggatccagcttttaaaaatctacactattcacttagtcaaagtatctattcgtcaagtacagcctattcctaattattttaagaatccacaatttggactctgagagccttggcattcaggacattatttgaccccctgtacttaaaatatcgatatttaatatatccaatatgtgttatttatattactttcatagtaatacagncatgcatcacttaacagcagggatacattctgagaaatgtgtcgntaggtgatttcatcattgtgtgaacatcatagggt

SEQ ID NO: 37272 - DNA, 481 bp, Homo sapiens
gaggtttaaaatagtatctcgcaaccgctctcgaattcccgggcggacgcgcgcgaaaaattaatgtgagcgtttgttttaagctcacagaaaacttaataattcatattctcaggaagtaaggactcaccatatcattgtcagtgctaatgaaattttgtaaaagatggcaagtgtgttacctcacttgagtggggttttccttttcccccaattctaagagaatataatgtgtatactaaaacattaataaacataattttgaaaaaaaaaaaaaaaggggcgcccgttttaaagaatccttggaggggccaaagtttacccgggcatgcaaggtaatagttttttccttatagggaggggtattataacctacctggggatttttggaaagaaaccttatttctggggggtgacatattggaccaacctccctacaaagattaaaggctttaggggaaatataaaatttttagtgtaa

SEQ ID NO: 37273 - DNA, 418 bp, Homo sapiens
cccacgcgtccgcagaacctggtggattgctcaactgaaaaatatggaaacaaaggctgcaatggtggcttcatgacaacggctttccagtacatcattgataacaagggcatcgactcagacgcttcctatccctacaaagccatggatcagaaatgtcaatatgactcaaaatatcgtgctgccacatgttcaaagtacactgaacttccttatggcagagaagatgtcctgaaagaagctgtggccaataaaggcccagtgtctgttggtgtagatgcgcgtcatccttctttcttcctctacagaagtggtgtctactatgaaccatcctgtactcagaatgtgaatcatggtgtacttgtggttggctatggtgatcttaatgggaaagaatactggcttgtgaaaaacagct

SEQ ID NO: 37274 - DNA, 468 bp, Homo sapiens
  misc_feature (1)...(468): n = A,T,C or G
nattggagcgcctgcggaaccgctccggaattgacggccctacccacgcgtccggtgcctagtatcattttcagatcaccaagtcagatttaggacgcatttaaaatgtgtgtatcaaaaatatttagctctccggattgaagtctactctccatccattctctgggcaaatactgactgagaacttactgtgtataatgtagtctggatctgggaaaggaaataaagatgggtaacagtgggtccccacctcaggtaggttttcagctgccctcaagaatcttgggatccagggttgtagaataaatacaatattttattacatcagtaaaagtcatctccaaactgttatttttcttttatgtatccaagaaatgtcttctgcttttcagagcaccaagactggttagacttaatattttcataccctgggcaactgtaacaattctattcctcttcatggccatt

SEQ ID NO: 37275 - DNA, 469 bp, Homo sapiens
  misc_feature (1)...(469): n = A,T,C or G
actggctcaagcagtggctccagctcttcctcagcatccagccgctcaggaagctccagcacctcccgcagctccagctctagcagctcttctggctctccaagtccttctcggcgcagacacgacaacaggaggcgctcccgctccaaatccaaaccacctaaaagagatgaaaaggagaggaaaaggcggagcccatctcctaagcccaccaaagtgcacattgggagactcacccggaatgtgacaaaggatcacatcatggagatattttccacctatgggaaaattaaaatgattgacatgcccgtggaaaggatgcatccccatctgtccaaaggctatgcgtacgtagagtttgagaatccagatgaagccgagaaggcgctgaagcacatggatggaggacaaattgatggccaggagatcactgccaccgccgtgctggccccctggcctaggccacccn

SEQ ID NO: 37276 - DNA, 385 bp, Homo sapiens
caaagggccgcgggcggcgggcagaggagtcccagtctcccggagcttccctgaggctgaggcgcccgggctcccgcccgccgcgctccagatgaagagtgagcactgcacgcgcaaggaatgtagtaagaaaacaaaaactgatgaccaagagaatgtgtcagccgatgcaccgagtccagcccaggaaaaaggagagggtctcactgtcacccaggctggagtgcagtggctcactgtatggctcaccgcagccttgacctctgaggctcaagtgattctcctgcctcagcctccctagtagctgggactacagaagggagaattccacaagttggctgatgccaagatatttttgagcgactgcctggcatgtgacagctgt

SEQ ID NO: 37277 - DNA, 424 bp, Homo sapiens
tgtgtgaagcccatgctaactcctgggcaggaagaccttcagtaaaaggcttagaaatggagtttatcctatcaacaaaagagagcaaggaaatgatgtaaaggcagtctattttcagagccagagaggaactgggagattgtagatagtttgcggttttcaattacaggcactgaaattgggggcagttggtgtcacaatcctaaaagaagttgtgagaagtgtttgtaggttagtcaggtagagtagacattagtagattctcttaataagttagaaaatgtttagctgaaacaggtatctttctgagtgctgacaggcctttaaacctgaactttttctttttcctcattttaagttcttgagggtctaagtcttgggtgctgaaacccatacctcacaggctcccgtccccagggaaggg

SEQ ID NO: 37278 - DNA, 419 bp, Homo sapiens
agaacatttgactggaaataaagaaaggatggaggatgaagttaagaatctaaccctgcaactggagcaggaatcaaataagcggctgttgttacaaaatgaattgaagactcaagcatttgaggcagacaatttaaaaggtttagaaaagcagatgaaacaggaaataaatactttattggaagcaaagagattattagaatttgagttagctcagcttacgaagtaagtctttaaaataacattgtgatttctttcttttttgtgttcatcattgacttgtgtgtttgacattttacatatgtacagattatgtacttagagtttgtgaaagacagaaaaaaagtatttagaagtaaaagaatttacttgcaaaggttttcaggggagttcaggctttggaaagaccacagttttct

SEQ ID NO: 37279 - DNA, 422 bp, Homo sapiens
  misc_feature (1)...(422): n = A,T,C or G
agaaacctctgcacagaagctgctttgctggctctgcaagaaaatggactagacgcaactacagtgaaacaagagcactttctaaaatcacttaagactgtaaaaccgtcgttaagttgcaaggacttggctttatatgaaaacttatttaagaaagaaggattttctaacgtggaaggtatttaaaaatcaccttaaactcttgttcagttcacattaattgaaatgtgaacttgcctgtcgtttgcaacttcacacttttagaatttgtgcttatatttcctgtaagtgaataaataaaacaaaacaaaacaaaaaaaacttgtgcctgataagctaaggctcatttatttttaaaaggcatattanataaaatactgtagttctggganaagaaaataacactttttagaatgggggtg

SEQ ID NO: 37280 - DNA, 491 bp, Homo sapiens
  misc_feature (1)...(491): n = A,T,C or G
cgcgccactgagactgaaggacntgcgcacggaaccccgggncgacccacgcgtccgctaatacccgccacatctaccatcaccctctacatcaccgccccgaccttagctctcaccatcgctcttctactatgaacccccctcccaaagtgctgggattacaggcgtgagccattgcacctgtccctgccagtgtgtttttaaaatagtttaaggggttgagaaaagatgcagcgagccattattctcctttagcaggtagactcttaaaaattgatgtggattttaaaaatataccattgagaacacgtatctttttcaaacttgaccttgaacagagctggatgggggtgggagggaaacagatttggggcatatggaagatattcttgggagccccatattctacctcagttaccgaaggctattacaacctctgaatttttcctcctctgaaatcctatgcacaacttcagaaaaccatgtctgat

SEQ ID NO: 37281 - DNA, 521 bp, Homo sapiens
  misc_feature (1)...(521): n = A,T,C or G
agagcgtggaaangannnaattctggattcgactgcnaatggacnggcattcngggncgacccacgcgtccgtgtgactttaggcaagctgtttaacctctctgtgccacctttttcccatctctactaaaatacaaaaattagctgggtgcggtggcacgtgcctgtaatcccagctacttgggaggctgaggcaggggaatcgcttgaacccgggaggcagaggttgcggtgagctgagatcgcaccactgcactccagcctggcgacagagcaagactctgtctcaaaaaaaaaaaagagggtcccagggcatacccacaaaaaaatgttccagcataaaggccctttttttacagcccctgcctgagggtaactgaaaaacacaaaaactgaccctttgcctttttttcttttccagctgggctgggcttgaacttgtggagccttgaggagctggtagaagggaccccggccattctctttcctccttggcaaatcctggaaacacccgagggggg

SEQ ID NO: 37282 - DNA, 408 bp, Homo sapiens
  misc_feature (1)...(408): n = A,T,C or G
cccacgcgtccgaattttctctacgttctatatgcaattgttatatatctatttgaatagctgaaggactaaaatacttttttaagagataacttcaggaaaccattatattttactatctgcatgctgttaactgtggtacactgtgaaatatgttgattacaaacccattcattacatagtataaggaattcacagtatattgactatatagtgtctaatgatcttggacagatactgtcaaacttacaatatctatatagatgtaggtctttttaaatttacctagtcattcttctatcatgtatattgatgctgaaagaggaactggtcagctcctctggacaacaaattcttagtctataatattaggagacatcttctgttttgcanatgtctgtgaatctg

SEQ ID NO: 37283 - DNA, 436 bp, Homo sapiens
ttgaacagttgggaaaggagtctgggtttcaccagaaagctctccagagggcccagaaagcagagaatatgttggagactcttcagggtcagctgacacacctggaggcagagctggtttctggaggtgttttgcgagacaacttgaattttgagaaacaaaaatatcttaaatttctggatcagctttctcagaaaatgaagttggaccagatggctgccgaacttggctttgacatgcggctggacgtggttttagctcgaacagagcagctggttcgtcttgagagcaatgcagtcattgagaacaagaccattgcccacaatttgcagagaaagctaaagacacagaaagagagactggagagcaaagaattacacatgagcctcctccggcagaaaatagcccagctggaggaggagaagcaggcacgcac

SEQ ID NO: 37284 - DNA, 419 bp, Homo sapiens
  misc_feature (1)...(419): n = A,T,C or G
atttttgtttagaagaactatttcatgcgctccattttatttattataataggtaaaaagaaaaaaaaaggttgtaattcatcacccatgtaaacatgctcatgaagttgaaagtaattaagatttgatacactgatatcaatttatttatgtaactaaatcactgttttataaacttgttaatgatcaacaatttttgttttgattaaaattagttttttgaaagttaaaaaaaaaaaaaaaaaaaaaaaaaaaaaaaaaaaaaaaaaaaaaaaaaaaaaaaaaaaaaaaaaaaaaaagaaaaaaaaaaaaaagaaaaaaaaaaangnnggggggggggcccttttttttatttttcgggggagcccctttttttgggggggggaaaaaaattattttttttttttaaggaaggaaaa

SEQ ID NO: 37285 - DNA, 419 bp, Homo sapiens
gcgcgggaggcaaaggttgcggtgagccgagatggcaccattgcactccagcctgggcaacaagagtgaaactctgtctcaaaaaaaaaaggaaatgctcacccaggtgatgccgatgcaatgggccaaagaccacacttacaggaaatactgctttgacttgcccggctctcctgaaagagacatttcttctgctgaatattgacatcgctaacattgatgcatagattgaaatgccatgcgcctaaaaaacatttgatcatgatcaccactatttgatattgatctgcctacagagttgaaaaaatggatcttacctaatgccaagttgaaatcaatgcctgtctatcctacaggatctatcctatgggattcattggggtactgttccaaacattcactcatatggctctttcctt

SEQ ID NO: 37286 - DNA, 417 bp, Homo sapiens
aaagaaatgagagatgagctacatgtccgaggtggtctagtaaacattgttgatctacaacaggtaattaatgtggacctgattcatattgaaaatagaattggtgacattattaaatcagaaaagcatgttcagttagtgttgggacaactgatagatgagaattatttggatcggttggcagaagaggtcaatgataaattgcaagaaagtggtcaggtcaccatatcagaactgtgtaaaacttatgatcttcctgggaactttctgacacaggcactaactcagcgacttggtagaattatcagtggacatattgatcttgataatagaggagtaatttttacggaagcttttgtagctcgacataaagcacgtatccgtggactattcagtgctattacccggcctacagct

SEQ ID NO: 37287 - DNA, 488 bp, Homo sapiens
  misc_feature (1)...(488): n = A,T,C or G
cgggagtnnnnnnaatgagncccctcggatnaggagcgtactagcaacngcnccggaannggggggnagaaccacgcgttcgctgttaagtgacggcaagagcttatttggcctctgttctcccctccgcaaggggatcggtggatccaaaagagctggatattctttcacccaggcatggcagacaagttaacgagaattgctattgtcaaccatgacaaatgtaaacctaagaaatgtcgacaggaatgcaaaaagagttgtcctgtaattccaatgggaaaattatgcatacaggttacaccccagagcaaaatagcatggatttgcgaaactctttgtattggctgtggcatctgtattaagaaatgcccctttggcgccttatcaattgtcaatctaccaagcaacttggaaaaagaaaccacacatcgatattgtgccactgccttcaaacttcacaggttgcctatccctcgcccaggcgg

SEQ ID NO: 37288 - DNA, 478 bp, Homo sapiens
  misc_feature (1)...(478): n = A,T,C or G
natgatnccctcgaanncatgatagcatgggangacccacgcgaacgtcaggattactatagagatcctcgagagcggactttacaacatgggctctattacgcttctcggagtcgaagtccaaatcgctttgatgctcatgacccccgatatgaacctagggctcgcgagcagtttacactgcccagtgtggtacacagggatatctacagggatgatattacccgggaggtaccaggcagaatgccagagcggaattaccagcacagcatgaggcggacaccacattcatcccagtctagaaatcagtctcctcaaagactggctagccaagcatctagacccacaaggtcccctagcggcagcggctctagaagtagatcctccagtagtgattcaatcagcagcagcagtagtaccagcagtgacagcagagattccagcagtagttcaagtgatgattctccagctcgatcag

SEQ ID NO: 37289 - DNA, 457 bp, Homo sapiens
  misc_feature (1)...(457): n = A,T,C or G
cccacgcgtccgggatataaatactgagtatgcttttgaattttatttttaggaaaattctgaagccagctatcacaggtttgttagctaataatagtattttcttttagttgagttaggtttttccccatctcctgtagagcgaatttacatattgtattgggtaagtgttcactacttttcctgattaagggatctgtgctggggaacaaagcttttgcagtaccttatattgtagttaaaattttatttaacatatccttcagtgagctcatttcacactgtagcctcttccttaaaatttgtggtgctcctgtaacagtaagaactaattctgaaataaaagacatctcctaatgctgtgcaaacatagtttacatgtattgaaggaggcagttgttaaattgagtgaccaatttaagcaatcagatatttgaaaactgcaccctttagtttn

SEQ ID NO: 37290 - DNA, 427 bp, Homo sapiens
  misc_feature (1)...(427): n = A,T,C or G
cccacgcgtccgaggagctctcagaggctaagaaggtggagaccggagaagctgtgaggttctttagcgtcacctccctcactgggcagcatgggggagaagtcagagaactgtggggttccagaggatctgttaaatggtttgaaggttacagatactcaggaagccgagtgtgctggccctccagttcctgatcccaaaaatcagcattcccagagtaagctgctcagggatgatgaggcccatctccaggaggaccagggagaagaggagtgttttcatgactgcagtgcctcatttgaggaggagccaggagcggacaaggttgagaacaaatctaatgaagatgtgaattcctctgaactagatgaagaatacctaatagaaactggaaaaaacatgtcggatgaagagaaacagaanagaa

SEQ ID NO: 37291 - DNA, 417 bp, Homo sapiens
  misc_feature (1)...(417): n = A,T,C or G
tcaagagaggaattacgcacaacttgacagtctaatatataactattgcattaaaggttgactctttggtaaaaaagaaaaaggaaggtttgaaaactggtcagtggataattgttaaagaggtagtcttcgggtatagtggcaacttggtagagtagaaagggcactgaactaggaatttagcaacctatgttttagttctaattctgccactagatagctgattgagctctttggactttagtgtcttaattttataaagtaaaggaaaggccgggcacagtggctcatgcctgtaatcccagcactttgggaggccgaagcgggtggatcgtgaggtcaggagttcgagaccagcctggccaagatggtgaaaccccgtctctattaaaaatacaacaatcagccaggcatggn

SEQ ID NO: 37292 - DNA, 427 bp, Homo sapiens
gcttctgattctcattcaggcttctcacggcattcagcagcagcgttgctgtaaccgacaaagacaccttcgaattaagcacattcctcgattccagcaaagcaccgcaacatgaccgaaatgagcttcctgagcagcgaggtgttggtgggggacttgatgtcccccttcgaccagtcgggtttgggggctgaagaaagcctaggtctcttagatgattacctggaggtggccaagcacttcaaacctcatgggttctccagcgacaaggctaaggcgggctcctccgaatggctggctgtggatgggttggtcagtccctccaacaacagcaagggtgagtgggccaccaccacatcgtcctggtgggatctaggggtaggggcctcctacctttgtatctgactcacttggccccatcactcaa

SEQ ID NO: 37293 - DNA, 426 bp, Homo sapiens
ccgagcctctcctctggccgccgcgcgggagagaggccgagatggcagatgagattgccaaggctcaggtcgctcggcctggtggcgacacgatctttgggaagatcatccgcaaggaaataccagccaaaatcatttttgaggatgaccggtgccttgctttccatgacatttcccctcaagcaccaacacattttctggtgatacccaagaaacatatatcccagatttctgtggcagaagatgatgatgaaagtcttcttggacacttaatgattgttggcaagaaatgtgctgctgatctgggcctgaataagggttatcgaatggtggtgaatgaaggttcagatggtggacagtctgtctatcacgttcatctccatgttcttggaggtcggcaaatgcattggcctcctggttaagcac

SEQ ID NO: 37294 - DNA, 435 bp, Homo sapiens
gtgtactcattaacatacaccaaatttacttttactttgttcagattgtggaatgaatttccaccagttctcttctttttaatgtgtaccctaagaggaattttactgaggttatagcataccccatgagcacagtggggaagaagaatgtgttgttatgtgctgctgctaaacacaagcagcagttgtaatttgtttttcagtttaaatgtggatatagttagatttttttttaagcagcaacttttcaaaaatataatgtgataatttctgaacttttggttgtgttgttaatagtggtgtgaaaatattaacgttcttgagaaaaactgataccactgttgtgtatcagtttctatacaatccataatcctcctgtacagtttttacatgtggttatgagtcttactaaaatttatataatggacttgtttt

SEQ ID NO: 37295 - DNA, 424 bp, Homo sapiens
cacagattatgggttggattgatgaatataataactgttttatttcagcacaataaggaaaacctagtcattataaactctcaaaatcatgtttaccttttacttaaatggagcttgtttgtattaatgattgtaatttatattgcagcataactctgctaatagagacatgataatttacaaaaagattaacaacgttttaggccgtactgaaaatattttcttttcttgataatggtctcttctggtgtctagaggagagctgagcaattccttttaatgaatagcagtggaaattaaaataattatgcttttctgtttttcccttcagaaaacctaactgaaaataaagacataacttgctatttttaaggtttcattaatccagcaaaataaattttcttttactgctttggagtaattc

SEQ ID NO: 37296 - DNA, 405 bp, Homo sapiens
cggacgcgtgggcggacgcgtgggtgaacgagggcttcgcctcctacgtggagtacctgggtgctgactatgcggagcccacctggaacttgaaagacctcatggtgctgaatgatgtgtaccgcgtgatggcagtggatgcactggcctcctcccacccgctgtccacacccgcctcggagatcaacacgccggcccagatcagtgagctgtttgacgccatctcctacagcaagggcgcctcagtcctcaggatgctctccagcttcctgtccgaggacgtattcaagcagggcctggcgtcctacctccacacctttgcctaccagaacaccatctacctgaacctgtgggaccacctgcaggaggctgtgaacaaccggtccatccaactccccaccaccg

SEQ ID NO: 37297 - DNA, 397 bp, Homo sapiens
  misc_feature (1)...(397): n = A,T,C or G
cggacgcgagggncagacttctccccattcaagctttcctcaggccctgggaaaaaagttgagatatgcagcccacactctacgccactcataacaagctggccacagccaccggagccaggaaagctctaaataaagtaaaaaattgactcactcacgagaaacctagggctgaattcataactctcaatgatcgccttcagaaggcatacctgccttcaaaaaggaagcacatgtggacgctctatcctcgagagagttcaatccttgaccttgaggtgaatcagacggcgggcgtgattgcaatacaacgcacaggagttccatttttacaggtaataccctgctttcagcgagatggttgatttcgtctacatgaaaatgggagtataacttg

SEQ ID NO: 37298 - DNA, 410 bp, Homo sapiens
ttccagagcaggaacgccaggttgacaagctatggtaggattaggaaagtttgctgaagaggatctttgacgccacagtgggactagccaggaatgagggagaaatgccctttctggcaattgttggagctggataggtaagttttataagggagtacattttgactgagcacttagggcatcaggaacagtgctacttactgatgggtagactgggagaggtggtgtaacttagttcttgatgatcccacttcctgtttccatctgcttgggatataccagagtttaccacaagtgttttgacgatatactcctgagctttcactctgctgcttctcccaggcctcttctactatggcaggagatgtggcgtgctgttgcaaagttttcacgtcattgtttcctggcta

SEQ ID NO: 37299 - DNA, 402 bp, Homo sapiens
cggacgcgtgggcggacgcgtgggcggacgcgtgggctcagtttggttactcaatgcccaggaggggctgagcaccagccatatcttttgctttggttcacatgatgatacctgcttttctcaggcctgctagaggcatccaacgccctggtttgtaaatagcaacctaaaggcgtattttggcactggtctggggacattccccatctctcatcccttttcccccttcacagatggtggtgggcttcgctctacaaagaggactctgatgttactcttgagcttatgagccagagagctgaaaaccgcaggcttgttgtgttaagttacaacgaaaatggatttggtaattaaaattagaagaaacacacctttcaacttcaacttctttaaaagaaaaaa

SEQ ID NO: 37300 - DNA, 421 bp, Homo sapiens
agaaaacagagatgtaaagttcctcattccaaggaataaatgtgtagctacaaaagtatctggcacacttatcatcatagtagaatgttctaagtgtgttggctgctcactgttaccattattggaaatttgtttctcccaacatctcttagctttcattatcaatataagccatagagtgagttacccgggtcaggactacctgggttagaaatgtaccttgggaaattaggtgaaataatctagcacggtgcccatcacatagtaaagtgccaatgaaaaatattcttttaattgccttttttcctgtacaattttgaaatatgcttctaaacataatttatataaaatctagtcatgtagcagttcacattagaatcttatgtacatttaaattggtctgtattatcgatgcacaatt

SEQ ID NO: 37301 - DNA, 404 bp, Homo sapiens
aaagtggcagtgtttcttctgaaattctcaggcagtcagactgtcttaggcaaatcttgataaaatagcccttatccaggtttttatctaaggaatcccaagaagactggggaatggagagacagtcaagggttatgtcagaaaaggatgagtatcagtttcaacatcagggagcggtggagctgcttgtcttcaattttttgctcatccttaccattttgacaatctggttatttaaaaatcatcgattccgcttcttgcatgaaactggaggagcaatggtgtatgacaagccgccgaaatttgccatgtcacgagagcaaatgtcacagtcatgttctcacacggcacataatgcaagtctgttgacagatgcgggtccattgtcatgtggggagtcgagg

SEQ ID NO: 37302 - DNA, 419 bp, Homo sapiens
  misc_feature (1)...(419): n = A,T,C or G
agaaggcagaactctcattttggaaggtttggaaaaggcagagaggaatgttttgcctgttttgaacaacttgctggaaaacagagagatgcagcttgaagatggacgcttcctgatgtctgctgagcgttacgacaaacttctccgagatcataccaaaaaagagttggattcttggaaaattgtccgagttagtgaaaatttccgagtgattgccttgggcttgccagtgccaaggtattctgggaatccattagacccccctcttcgttctcgatttcaagccagggatatttattatttacccttcaaggaccaacttaagttgttatattcaattggagccaatgtttctgctgagaaagtttctcagctcttgtcctttgccacaactctgtgttcccaagaatcttctactn

SEQ ID NO: 37303 - DNA, 476 bp, Homo sapiens
  misc_feature (1)...(476): n = A,T,C or G
cccacgcgtncgagcttgcccagcttgagaaactacaagatgaagagctggaccctgaatttgtgcaacaagtagcagacttctgttcctacatctttagcaattccaaaactaaaactctttcaggaggcatcaaggtcaatgggccttgtctagagagcctagtgctgacctatatcaatgctatcagcagaggggatctgccctgcatggagaacgcagtcctggccttggcccagatagagaactcagccgcagtgcaaaaggctattgcccactatgaccagcagatgggccagaaggtgcagctgcccgcagaaaccctccaggagctgctggacctgcacagggttagtgagagggaggccactgaagtctatatgaagaactctttcaaggatgtggaccatctgtttcataagaaattagcggcccagctagacaaanagcgggatgacttttgtaaacagaatcan

SEQ ID NO: 37304 - DNA, 465 bp, Homo sapiens
  misc_feature (1)...(465): n = A,T,C or G
aaaaggcctcaaattcttgtgaatgtggacattctcgttaatattcttttgggctaatagtgacatagtgtgcagaggtgtaccagggatcatgggggatttcctagcactagtatgcttctagttttagataactccctcctttattccctggccccttgtattttccttatcttcctctttcaagacccctacccattttgcctatccgtaggctggggcttgtgtctttgtcattgtctggttcttaagagtcccagactttgggagaccagctccaggtggcgtcctccctgcctctccgtcttgtaatgagttgtagtatttactcttaacataggatcatttggaacaggagttctgaggaggagagagtgagggttntgctatttgctgacttgaacgatggcttctcctcaagctgtaggctccagagcttcctaacctagtaaaatgtcaagaaca

SEQ ID NO: 37305 - DNA, 411 bp, Homo sapiens
tgcgctgtaatccagacagtagttatgcgaactgccttgaagaaaaaggaccaatgttcgaactacttgcaggtgaatccaacaagatcccccgtctgaggactgacctttttccaaagacgagaatccaggacttgaatcgtatcttcccactttctgaggactactctggatcaggcttgggctccggctccggctctggatcaggatctgggagtggcttcctaacggaaatggaacaggattaccaactagtagacgaaagtgatgctttccatgacaaccttaggtctcttgacaggaatctgccctcagacagccaggacttgggtcaacatggattagaagaggattttatgttataaaagaggattttcccaccttgacaccaaggcatgtagttagcatatt

SEQ ID NO: 37306 - DNA, 408 bp, Homo sapiens
cccacgcgtccgaaaaaataatttagtatcaaggcttcagaaaatgccatttacggcatcccttctgtatgtaacaaaaagacattcataatgttaggaagatgataaaaattcgctcttttaaagtgcagcttattattctcaattgctaaatacgattactctgctttatttttttttcatttcttttgatgccatatgtgagtatcttataatttagttcatttgttcagggtaaaatttgaaacaaaaaattttacctgtgcaaaatagttttttaaaaattatacatgtagctcaacttgaggtactgctatataaatattcactcacattatcacggaatttatgtatagtttctctaatatagaagataaaattggtgtcctcataactttaacaaagaaa

SEQ ID NO: 37307 - DNA, 419 bp, Homo sapiens
  misc_feature (1)...(419): n = A,T,C or G
caagccatctgcacgtgcaacatccaaacttggcagcccagacacagtttctcctagaaatcgccaaaaattagcaaaagagaagttacctaccagcgaaaaagttagtaactctcccccattaggaagatcaaagacacagctctccccttctatcaagcgcaagagagaagtcagccctcctggggcccgaacaagaggccagcaaagggtggaggaagcccctgtgaaaaaagcgaagcgataatcctgaccactgctgccctaggcttatggaggaacacggtggagaggaaagagacatgccttggtggccataggcttctctttaaccaggaaaaagatatgcatgtgctggaagtccctaggtgcaagctttttcttgttatgttttaaacagctttataaactattgttcn

SEQ ID NO: 37308 - DNA, 412 bp, Homo sapiens
  misc_feature (1)...(412): n = A,T,C or G
agaaggtagactttcaaaattgccccgacgatctagattctacatgttaccattggtttattcttgtgctttctgtatttaaaactttggctgtactaagcaaatgcaaggttataatttagctaatagtagtttacagacaattctgatgattatgatttcatttggtttaactaagctgtactagttcatttcataaggaaatgatactgtagacaaatgtaaataaagcctgtgagtcaagcatcaagtggtgtttgttagaaataaactagagatttttaacaaaaaaagaaagaagaaaataaaaccaaaaaaaaataaaaacggatcaaataaatatatatataaaaagatatttnnggggggggggttttaataaagatcttgagggcgccaattatttttgtgt

SEQ ID NO: 37309 - DNA, 408 bp, Homo sapiens
aacagagcgagactccgtcaaaaaaataaataaataaataaataaaactgttgttttctgcgagacctaagcgaagctcggcagagatgggatcagcgctgatgctgaggctgggactggccggagcttgagtgaggggttgtttaaaggagaaactgggctctgggcgttaaagcctgaggagagtactggcttatacggagattctgcccttgattgataggtgagggaggacccttaagttattggcgagaagctcaggtgagagcgggcctctgggaggatggagtggtgacagctataggaatggaaacgaatattactttggaaagtcaggagggaaggtgccagttgaaaagaaaacctgagactgagtgatctcaagaaagagtgtagatctgccagagt

SEQ ID NO: 37310 - DNA, 409 bp, Homo sapiens
agggcgggcgcggggtcttggcgaacggtcttcggaagcggcggcggcgcgatgaccacgctacgggcctttacctgcgacgacctgttccgcttcaacaacattaacttggatccacttacagaaacttatgggattcctttctacctacaatacctcgcccactggccagagtatttcattgttgcagaggcacctggtggagaattaatgggttatattatgggtaaagcagaaggctcagtagctagggaagaatggcacgggcacgtcacagctctgtctgttgccccagaatttcgacgccttggtttggctgctaaacttatggagttactagaggagatttcagaaagaaagggtggattttttgtggatctctttgtaagagtatctaaccaagttgcag

SEQ ID NO: 37311 - DNA, 423 bp, Homo sapiens
  misc_feature (1)...(423): n = A,T,C or G
ntatacatatctgtatcaacacctatatgtaaactcttcttcttacctgatacactccttcacccggtgtgggcactaactagaacattttcaaaggaacaaacaggaaggagcatgctgacactccagggtgcatctgagctgagaatttagatgacctcattcaagaaagtaaactgagcattgatgggaaagcactctgcgcgaagtaacattcccactgttaatgttgcagtcaaaattgtggaaaaaaaaaagtggggctaaaattgttctgaaatgaaaattgcttgttgtgaggaatattttaatactcttggactttagggaggctattttatgggccacttgctcctagatgtttcattgtattagcaattagcacactgtcctggaaccaagggtttggtacttttgcctgan

SEQ ID NO: 37312 - DNA, 423 bp, Homo sapiens
ctaatctttaagctctgcaattctttcctctgcctgttctagtctattgataaagctttaatttgtatttggaaatttcttaagtgagtttaggaaactctgattttttaattccagaagctcttcttttccattaagatgtttatttcttctgccattttcttaattgctttagaaatctctttgtgttgatttttaaccttttgttggatctctttgtgcttccctgcagcaattctggaggattcccttttttcttttcacagaaatgatctttatgcactatcttgctatttccaagtggctgatgcatgctaaagccctcttattcatcatcttggaataaaaaaattcatttttttccacatagaatttattgcatcatcttagttaatttaacccttaacatttttggcttagttc

SEQ ID NO: 37313 - DNA, 398 bp, Homo sapiens
  misc_feature (1)...(398): n = A,T,C or G
gcgaagccacagaaaccgtccctgttacagagcatgagttgccgcagccccaggctgagacagggtgtggaacataatctgacagtgatgaatcagtaccagagcttgaagaacaggattccacccaggcaaccacacaacaagcccatctggcggcagcagctgaaatcgatgaagaaccagtcagtaaagcaaaacagagtcggagtgaaaagaaggcacggaaggctatgtccaaactgggtcttcggcaggttacaggagttactagagtcactatccggaaatctaagaatatcctctttgtcatcacaaaaccagatgtctacaagagccctgcttcagatacttacatagcttttggggaagccaagatcgaagatttatcccagcaagcn

SEQ ID NO: 37314 - DNA, 406 bp, Homo sapiens
cagtccttccatgcccttctatcccagattacctaaatgttcccttctcaggaattctgtctcatcagttcttcacagtgagaaaagaggctagatgatggtgtggggggttggagttttcttctaataccgagggttcctggctgtgaggaaacagccacatgttcgtcatgattgagctgtgaagtcttcttggacctgttgtctgaaaataaagttaatttgtttgaggcatctctcttaagtaggtggaaactattgaagttcatctaacaatcacagcataggttctgatgcatggaaaggtggttggtgaatgaaaaagttgcgtaaagccactactttctttttccctgagaataaatttggataaaacaggtaaaaaaaaaaaaaaaaagggggcgcg

SEQ ID NO: 37315 - DNA, 475 bp, Homo sapiens
cggacgcgtgggttgagggatttgaaatagtacataaaagagccatttaaatgacatatggtgttcaaaaactgtatgaattgaagttctattttaactaaataaatttgtctgtcctagggctaagccatgaggttcaggaagatttttctgtgcgggttgttgagagtgtgggaaaaatagagattgttctacaaaaaaaagagaatacttcttgggactttcttggccatcccctgaagaatcataattcacttattccaaggaaagatacagggtgggactgtaaagctaattggaaactgtgcatgtgggtgtggcttgtcaacggttatattcactatatggctggaacatttctttgggaaaagtccaatgccaagagtccctagagtgaacaatctcctaccttgtacccagcatttcagaagccatgtggggaagaaggctgggcctagcttctggtatatctgtt

SEQ ID NO: 37316 - DNA, 459 bp, Homo sapiens
ctggtctcgaactcctgacctcaagtgatccgcccacttcagcctcccaaagtgctgggattacaggcgtgagccgtcatgcctggccgagttcagcttttattcacattttttccccgaagtgatttattcttcaaagtagacagctatgttctataaagcgttttgttttttctttaacaaaataatttacataaacagagattatggtaaacattttaaatcttacgctggtggttaaatttaatggtttaagcactggtgcgttctctttaattaatatttgcagaaagagaacatatgtgttgcactgatatgtatggtccagaaaaattacttaattctcaaaaatatgtggcattctcatattgtgttagggaaaagtccataagaaagctattttttttttcttttgctcgctagtaacatccaaccaccggaaagaaaactgactcattt

SEQ ID NO: 37317 - DNA, 491 bp, Homo sapiens
  misc_feature (1)...(491): n = A,T,C or G
ggcgccaatgatnactgcaggcatgcgcacgaacncccgggncgacccacgcgtccgcccacgcgtccggtaacttctgaggacaaaaagtttcatgagacccttgaacagcggctgcttgtaactgaactgatgcggctcttatgtcctagccaggagagggagatacctccactgctggggctggagaaagcggaccttctggaactcatgccactctcagaggattttgtgtggatgagggctcggctacagcaagaagtagaggagcagctcaaaaagaaatgtttcactctgctctgctactatgatcccaattcagatgctgacagtgaaaccgtgaaggcagcaaaggtgtggaaactcgcagaggtcctggtgggtgagcagcagcagtgccaggatgccaagagccagcagaaggagcagatgttgctgctggagaataagagtgctgcttactcccaggagcttctccgctgcctcactgt

SEQ ID NO: 37318 - DNA, 401 bp, Homo sapiens
cccacgcgtccgctgggttcaagaagtttctgagagtagtggggagcagggcgggtcctgcctaaatactcactgagggccgggtggtggctcacagctgtaatcccagcactttgggaggccaaggcaggtgggtcagttgaggtcagcagttcaagaccagcctgtccaacatagtgaaaccccgtctctactaaaaaaaaaaaaaaaaaattcccaaattttgctcggcatagggccatgtgcctataatcccagctattcaggaggctgaggcaaaataatcgcttgaacccgggacccaaaggttgcagtcagccgaaatcgcaccactgcactccagcctgggcgacagagcgacactgtctcaaaaacaaaacaaaaaaaacctcagggtgact

SEQ ID NO: 37319 - DNA, 413 bp, Homo sapiens
  misc_feature (1)...(413): n = A,T,C or G
atcagcggttattcggtgagcggtggtggtttattcttccgtggagttaagggctccgtggacatctcaggtcttcagggtcttccatctggaactatataaagttcagaaaacatgtctcgaagatatgactccaggaccactatattttctccagaaggtcgcttataccaagttgaatatgccatggaagctattggacatgcaggcacctgtttgggaattttagcaaatgatggtgttttgcttgcagcagagagacgcaacatccacaagcttcttgatgaagtctttttttctgaaaaaatttataaactcaatgaggacatggcttgcagtgtggcaggcataacttctgatgctaatgttctgactaatgaactaaggctcattgctcanaggtatttattaca

SEQ ID NO: 37320 - DNA, 425 bp, Homo sapiens
cccacgcgtccgcacgcaggctgagacagtggggaccgccgaggccagagtgggctatgcttgagcagggatgagaagggccgcggcagcacgcagccttgacccacgcctgcgtcttgtggtgcaaggccagagggctctctctagaacctgaccgtgcactccatctcctgggagccacttttggcaagagtgagtgtggggggaaaagtgtgcacaagagatacggaaccctgagctagggtttcctgtcaccaaagagtgagctgcatttccagttctgcgttaaagtatcgtttgttctggtgcctgcctgtggtggtgatttggagactcaaatttcctttgccaggtctcttttgtctttctttgggattggtagtatagaagatgctgggaattgtcttcctcgctcagcctcggct

SEQ ID NO: 37321 - DNA, 426 bp, Homo sapiens
tagatttcatggtaattttgtgagcctgaacttgatttaaaaaactaattgactttgaaggctagtttaagttagctaagttttaagatctgagagtaattcctaaaaatgacaagatattaatagtttaaagttaagtattttagaattatttcagaatgaactatagatagtaaattaagattaagaaagcagtttcttaatatcctaatgttatgaactgatttttggattcttaattattttctgccttattgtgaattgctttagaaaaggttagtagaattaacatgaccatttaagcagtttcagcttatttccttttttaaagaaatgtagtagtctttttacaactaaggctgagttgtttttctaaatagactaaaaattttatagaaggccagataaaaatatattacacatttg

SEQ ID NO: 37322 - DNA, 406 bp, Homo sapiens
  misc_feature (1)...(406): n = A,T,C or G
aagtacttttggttatttttctgttatcaaacaaaaataggtatcagtgcattattaaatgaatatttaaagtagacattaccagtaatttcatgtctactttttaaaatcagcaatgaaacaataatttgaaatttctaaattcatagggcagaatcacctgtaaaagcttgtttgatttcttaaagttattaaacttgtacatataccaaaaagaagctgtcttggatttaaatctgtaaaatcagtagaaattttactacaattgcttgttaaaatattttataagtgatgttcctttttcaccaagagtataaacctttttagtgtgactgttaaaacttccttttaaatcaaaatgccaaatttattattgtggtggagccactgcagtgttatcttaaan

SEQ ID NO: 37323 - DNA, 416 bp, Homo sapiens
cccacgcgtccgcccacgcgtccgccacgcgtccgtccacgcgtccgtggctgagttgggctggggggtgatgccggctggagcagcaagcaagggacaaagtaccacggtacctgaggtgtacgtggtcttccgggactccagatcaacgacctgcagactgcggagcctcgccccatggaggactccgggtgccaatgtggagaagacggccaccctaggccagagactctcctctttctcatgcacagcaatggtgctgacagctttaatgacatctaggggaaaacgaagaggccaaaatccagaactttaatgaaggtttgaaacatgacaggctgccagctgtcttcccctgtacatttagaagatcaaggaagaaaaggagctgccggctggcaagagatgatgttgag

SEQ ID NO: 37324 - DNA, 426 bp, Homo sapiens
  misc_feature (1)...(426): n = A,T,C or G
ataacctctgcctcaagtacgtcggtgtggccttctacaatgtgggccgctcactcaccaccgtcttcaacgtgctgctctcctacctgctgctcaagcagaccacctccttctatgccctgctcacctgcggtatcatcatcgggggcttctggcttggtgtggaccaggagggggcagaaggcaccctgtcgtggctgggcaccgtcttcggcgtgctggctagcctctgtgtctcgctcaacgccatctacaccacgaaggtgctcccggcggtggacggcagcatctggcgcctgactttctacaacaacgtcaacgcctgcatcctcttcctgcccctgctcctgctgctcggngagcttcaggccctgcgtgactttgcccagctgggcagtgcccacttctggnggatgatgacgctgg

SEQ ID NO: 37325 - DNA, 421 bp, Homo sapiens
agatccaacagaatcactcttgctggacagaacgctttctgccacctacacatttctatttaggaagtaaaatttgcttcatggtcatgaccccattagtcagtgttacagctgtgttggggataggaagtatatctggcagattgacatttatacacttttttataaagcagattttaaaatatagtaacatccatttttttcccttgaaagtgattctcttataaaaaatgaaagtggagtttaaggtatatcaaatcgttgtggaaggtgattaaaaatcaaaattcttttaaatatcaacttaattttttctaagtaagatacaaaaaattttcatctaaagtaatatttcactttatattgtaaagaaggtaggtatattggtggctgaggtctcttgaattgctaaagggaaatt

SEQ ID NO: 37326 - DNA, 504 bp, Homo sapiens
  misc_feature (1)...(504): n = A,T,C or G
agaaaaaacaaattgagataccctcggtacaggctngggaaaccngcgncgacccacgcgtncggtggctttgtctgtgtgatctgtgtgtgtatgtggcttgtggaatctgtccagtgcaggtttatgaggaggctccaggaggctggctggctggctcagagtctgtgcccggctatccactatcccagagcagttctccctatagcccagtaagaaattacaccttcaccttccagactggcacccacgctctcccagaaagtgagaagggaactcacaggtgacttcaccccatggtggggagaacagcctgtgctggggtcaaggcagaaggaggatgagccccgaggctcctggagagtctgagcctgggtgaggaaagagaggaggtggtccctgatctcagggcggggagagccaatgaggagacggagccataccacgcggctctcagctgggggatcctggtcccctcaccatcttctctcccccaggctaggn

SEQ ID NO: 37327 - DNA, 421 bp, Homo sapiens
  misc_feature (1)...(421): n = A,T,C or G
agaaaagaagaaattagctgctcttatgtcttccccgcaaagcagaacagttcgaagtgaaaatctagaacaggtgccccaggatgggtctccaaatgattgtgaatcaatagaggacttgttaaatgagctaccatatccaattgatattgccaatgagtctgcatgcaccactgttcctggtgtttccctgtacagtagtcaaactcatgaagaaattttagcggaattattgtctcctacacctgtttcaacagagctgtcagaaaatggggaaggtgactttaggtatttgggaatgggagatagtcatatcccaccaccagtaccaagtgaattcaatgatgtttcccagaacacacatctgagacaggaccataattattgtagccccaccaagaaaaatccatgtgaagttcan

SEQ ID NO: 37328 - DNA, 443 bp, Homo sapiens
agggataataggccaattatgatctttatttttaatttctacagaaaagtactagagaatatatctatagaaacttctttcagataaccctaaagatgatactagaatgtttataaaattattgagaagattatttgtgttataaagcttatttgtaccatagtaaaggatgttcttgttcctcttcattctgggctaatctgtcaatactgaagtccagtcttttcccccttttcttaccagctcaaccttgattcctgtgacccattctttctgatctttcgtagttcataggcaccaggcatgagtaccttggatagccctctgaagtctgttaccacccagatttccaactcgggttagataggactaattctattagcctggataaataatccaaaatctgcgcagactctgggagcaaaatgttctactcagtttgg

SEQ ID NO: 37329 - DNA, 405 bp, Homo sapiens
  misc_feature (1)...(405): n = A,T,C or G
cccacgcgtccggggtattgaaaatgtaaagatatattccttttctcatttataaatagacaagagggaaacctgatttccctgtatcctattatattttaggcttctcatgcaagcacagatgccatggttattttaggtgtcatttttaaaaattatatagctcatttataaacctttattttttaaaccttttttatattactgctgtccttatcagatcattctagcaatgccaaaattatgatagtggcttctgaaaatatttgaaaaatctaaaaagatgatactacctatttttttgatactattttaaattaatgattaacatattggaactttagatatgtctacgtggtaaaagtaatcaaatgaatgtgttcagaaatacttggctgtggagtn

SEQ ID NO: 37330 - DNA, 231 bp, Homo sapiens
tggggtctgggtgagcgcatgcttttcatatccggttcttgccgtgtttatgggcctacatatccatgtgctttcattagtgctagaaaagtcctattcaatatgtcttttaatatttacttctgccccattacctcctctccttcagtaaacttaattttaggaatgctagatattgagagtttttttctataggtctcttacacagtgttctgtttcttaatctcgcga

SEQ ID NO: 37331 - DNA, 433 bp, Homo sapiens
  misc_feature (1)...(433): n = A,T,C or G
agaggtggaggttacagtgagctgagattgtgcgactgcacactcaagcctgggtgacagagtgagactctgtctcanaaaaaaaaaaaaaaaaaaaaaaaccccaaaaaaaaaaaaaaaaagccccccccaaaaaaaaacccttgggggaaattttggaaaaaaaatttaaaaaaacgggaaaaaaggggaaaaaaaaaacccccccccgggaaaaaaaaaaaaaaggggggggccccaaaataaaaaaagggattcaaaaaaaaaaaagggaaaaataaaaaaaaaaaatttctaagaaaaatttttttaaaaaaacccaaaaaggggaaaaaccccttattttttgtttttgggaaaaaaaccccccccccttgggaaaaaaaaaaaaaaaaagggaaaatcctttcccccccccccccaaaaatgggga

SEQ ID NO: 37332 - DNA, 425 bp, Homo sapiens
tgaagtttatgcagctctgggaagaaagccagcaggttagagttgtgagctttgtctcactagtgttttgccacctgtatgtagcccgtggacagcagactcttctgcagctcttacccttctcacagaggttgtggtgaattgatttaaatatttaaaggttctaagagacttgccaacagaagagcataataaagagaacaagaaaatctcgaaagccatattttataattatatgaaaaccatcattcactgtggcatatctctgctgaagaggacaggacatcctcaagggatcccatggacaccctgtgttggggagtggggaggaagaagtgaccagaaggggcagggagcagtggacagtccacccccgttcctcacatggctgggaaccctgtcactgtacctcgccccccgtaggg

SEQ ID NO: 37333 - DNA, 410 bp, Homo sapiens
cccacgcgtccgaaccatggagggtgtagaagagaataagaaggaggttcctgctgtgccagaaacccttaagaaaaagcgaaggaatttcgcagagctgaagatcaagcgcctgagaaagaagtttgcccaaaagatgcttcgaaaggcaaggaggaagcttatctatgaaaaagcaaagcactatcacaaggaatataggcagatgtacagaactgaaattcgaatggcgaggatggcaagaaaagctggcaacttctatgtacctgcagaacccaaattggcgtttgtcatcagaatcagaggtatcaatggagtgagcccaaaggttcgaaaggggttgcagcttcttcgccttcgtcaaatcttcaatggaacctttgtgaagctcaacaaggcttcgattaact

SEQ ID NO: 37334 - DNA, 415 bp, Homo sapiens
  misc_feature (1)...(415): n = A,T,C or G
tggagaagcagttggtggctctcattccctatggggaccagaggctgaagcccaagcacacgaagctctttgtgttcctggccgtgctcatctgcctggtgacctcctccttcatcgtctttttcctgtttccccggtccgtcattgtgcagcctgcaggcctcaactcctccacagtggcctttgatgaggctgatatctacctcaacataacgaatatcttaaacatctccaatggcaactactaccccattatggtgacacagctgaccctcgaggttctgcacctgtccctcgtggtggggcaggtttccaacaaccttctcctacacattggccctttggccagcgaacagatgttttacgcagtaactaccaagatacgggatgaaaacacataggagggtctcactcn

SEQ ID NO: 37335 - DNA, 400 bp, Homo sapiens
cagaaagagggcagctctgcgataatttttgttacctgggagatcttatctgcataccaagacaacttttattcaccgtatatttcctcccctcacctttccacaactttgtggccaccatcccccagaaagccgcaagcccccatttcttgagtagcgtaggatgctgtataatattcaatcatctgaccatggtgggactcctctgcgtatgtaattaagtacgggttttttttcttgttaatgtctatgtcaggttaatttgtaacccagccaaagaacctatgaggatggagggaagccgtttttccctctcctacacctcagtaacctactgccagctgaagaaatagaacattactaaagccacctgtacatctttctccttttgaattacctg

SEQ ID NO: 37336 - DNA, 406 bp, Homo sapiens
ggaaaaatactatgagtgtgctgaatttggaaagagcttcacctggaagtcacagttcaaggtacatctgaaagttcctacaggagaaaaactctatgtatgtattgaatgtgggagggcttttgtacagaagccagaattcatcacacatcagaaaacccatatgagagagaagccctataagtgcaatgaatgtggaaaatccttttttcaagtatcgtctcttttcaggcatcacagaattcataccggagaaaaactatatgaatgtagtgaatgtgggaaaggtttcccttataactcagatctcagtatacatgagaaaattcatactggagagagacaccatgaatgcactgactgtggcaaagcgttcacacaaaagtccacactcaagattcatcag

SEQ ID NO: 37337 - DNA, 392 bp, Homo sapiens
  misc_feature (1)...(392): n = A,T,C or G
aacatttgttgaagtatttttttgcaattcatattttgttttctaaaactaaggtttgttcaggttgctgcaagctcagctgaatctgtgagcctgaggtctgtttcaaatttctccccaataggcgcctttatttctgaggtggttctaattcgctaggcaggcctgagcgaatacaagtttagcttgtccctgttgagtaagtagggcatgctacaatggataatttaaaagcttgatagctgggactgaatagaagaaaacgggaaacttagaccaagttctcccctgagaaatcttgttaaaacacattaagtagtcaaaatagtaatctttatcatatctgccatattaacccctttgtgtataatgaccaggcagtgttaaactgn

SEQ ID NO: 37338 - DNA, 411 bp, Homo sapiens
gaatcgctggtcgccagcgaggggtgcggcttcaatttcaataactttattggtggcctgagctgcagaacagccatcacatcagtggcccttggaggagggagcgcatcgcccgaggtggtccccgacgagctgcagccatgggaaacaccaccagcgaccgggtgtccggggagcgccacggcgccaaggctgcacgctccgagggcgcaggcggccatgccccggggaaggagcacaagatcatggtggggagtacggacgaccccagcgtgttcagcctccctgactccaagctccctggggacaaagagtttgtatcatggcagcaggatttggaggactccgtaaagcccacacagcaggcccggcccactgttatccgctggtctgaaggaggcaaggaggtct

SEQ ID NO: 37339 - DNA, 418 bp, Homo sapiens
cggacgcgtggggcaggtggagaaggccaatgaagccatggcaattgacacattgctcatcagcgatgagctcttcaggcatcaggatgtagccacacggagccggtatgtgaggctggtggacagtgtgaaagagaatgcaggcaccgttaggatattctctagtcttcacgtttctggggaacagctcagccagttgactggggtagctgccattctccgcttccctgttcccgaactttctgaccaagagggtgattccagttctgaagaggattaatgattgaaacttaaaattgagacaatcttgtgtttcctaaactgttacagtacatttctcagcatccttgtgacagaaagctgcaagaatggcactttttgattcatacagggatttcttatgtctttggctacacta

SEQ ID NO: 37340 - DNA, 379 bp, Homo sapiens
caggggatttatactaaaatatatttttgcagatgcagtaagtataaaagaaatttaatccaaaattaagtgtgtgtaaatatcagagaattcacagtagaaatatctaaggcactgacattttagacattgaactaatcagtgtgctgagtacagaaaataatccaaaattaaagttggtagataaattatttgtatataactttaaaagaggtagaaatatttttagttataattacatttaaagtatacttttttctttgaaaaaattacaaaatttttaaaaagcgaatgatgtaattcaactcaaattacttcatgcttttcattctattcacatgtgaaagcatgtgatcaattgctgcttcatcaaagatat

SEQ ID NO: 37341 - DNA, 380 bp, Homo sapiens
atcatctgaaggtaaaattttccagatacggcagacggctttcagagtacaataaacagggaatgagaactatttacatggaagtttctttctcatgatgcggtggagaagcctcggccacttggttctgccagatgttcctggggttactgtaaatgggaaggacaggcagagctaaacaaggtttatcatttaaaagtgcctgtgtgaagtcacttttgctggaaaactgcagcttgggagctttctttgtattcacatcccactcttctgtcaagtacactttaccctgaccttatgagtggatgaagatacctcagttgtctgactttgccaattgcttaatttcagaatttaaaaaggggaaagaaaaacatcct

SEQ ID NO: 37342 - DNA, 394 bp, Homo sapiens
ctagtgggaagcagaccagttagagaattgcttaatatgaagctagttggttttagaaatcacatagcccaacccctcatgaaagaaccacggcttggataaaattacatagaaaatgaatgacacagactattgggctgagaatgagaacgcgtatcccctcacttttatcgggaacacagctacctgcctcccgagagagtctccctagccaagtttccttgttaatgtgatgagactttactagaatgtctctgtcctgtttatgcttccctgtgctcttccttacatccccttagctcttgatgttataattttaaaatattttcatttcccctaaaggctacaacaacaaaagaaatgtttatagaatttggatgaattatgatttaac

SEQ ID NO: 37343 - DNA, 407 bp, Homo sapiens
cggacgcgtggggtccaacatgtaaaggtactcagtgaatattggcgatgatgacgataataaagatataggtacacattggaggatatcaatggaaaggggcattagattctggagtatttgaagtagaactaacaggattcagttactgagtagatataaagtgtagaagagagtgtttggagactcaactgatggtgatgccatccactaagttgagtacataaaagcatgtcttcattttaaaaggctgaaagctgattggaattccttatcttgtttttacttaattcattgtgagtactgcgtttgaaatatccccagtttagccaaatatacttcgtgaattttaaatttatttaaatatatacttaaaatttttgtaagtatctttacaaagatatctg

SEQ ID NO: 37344 - DNA, 436 bp, Homo sapiens
taagaagagtcttggtcttgatgaattcaaagcacacttttctggccttgtgtgcccttcgctttatgaggcggataattggacttaaagatgaattttataatcgttacatcaccaagggaaatctttttgagccagttataaatgcacttctggataatggaactcggtataatctgttgaattcagctgttattgagttgtttgaatttataagagtggaagatatcaagtctcttactgcccatatagttgaaaacttttataaagcacttgaatcgattgaatatgttcagacattcaaaggattgaagactaaatatgagcaagaaaaagacagacaaaatcagaaactgaacagtgtaccatctatattgcgtagtaacagatttcgcagagatgcaaaagccttggaagaggatgaagaaatgtggtt

SEQ ID NO: 37345 - DNA, 391 bp, Homo sapiens
  misc_feature (1)...(391): n = A,T,C or G
gcgcccacgcgtccgcccacgcgtccggttcgggtgtgtaatgtctgagtgaacctgtataagtggaggcactttagggctgtaaaatgcatgattttgtaacccagattttgctgtatatttgtgatagcactttctacaatgtgaactttattaaatacaaaacttccaggctaaacatccaatattttctttaatgcttttatatttttttaaaatgttaaaacccctatagccaccttttgggaatgttttaaattctccagttttttgttatatagggatcaaccagctaagaaaagattttaatcaagttgaattgaggggattaatatgaaaacttatgacctcttcctttaggagggagttatctaaaagaaatgtctattan

SEQ ID NO: 37346 - DNA, 459 bp, Homo sapiens
  misc_feature (1)...(459): n = A,T,C or G
cttatgcgcagacggngaagcggagccaacatgccagtggcccggagctgggtttgtcgcaaaacttatgtgaccccgcggagacccttcgagaaatctcgtctcgaccaagagctgaagctgatcggcgagtatgggctccggaacaaacgtgaggtctggagggtcaaatttaccctggccaagatccgcaaggccgcccgggaactgctgacgcttgatgagaaggacccacggcgtctgttcgaaggcaacgccctgctgcggcggctggtccgcattggggtgctggatgagggcaagatgaagctggattacatcctgggcctgaagatagaggatttcttagagagacgcctgcagacccaggtcttcaagctgggcttggccaagtccatccaccacgctcgcgtgctgatccgccagcgccatatcanggtccgcaagcaggtggtgaac

SEQ ID NO: 37347 - DNA, 456 bp, Homo sapiens
gaagctggaccaggaaccttggaagtcagccagccctagaacagtcagcctaaattttggccgtaatggcttttttggttttttgttttgtttctgagatggagtctcactccgttgccaggctggagtgctgtggcgctatctcagcttaccgaatcctccgactccctggttcaagcgattgtcctgcctcagcctccggagtagctgggattacaggcatgcaccaccacacccagctaatttttgtatttttagtagagacggggtttcaccgtgttggccaggatggtctccatctcctcagcctcccaagtagttgggattacgggcatgcaccaccatgcctggataattttttcttatttttagtagagacaggatttcatcatgttggccacgctggtttcgaactcctgaccacatgtggtccacccaccttggcctcaattatgt

SEQ ID NO: 37348 - DNA, 462 bp, Homo sapiens
  misc_feature (1)...(462): n = A,T,C or G
cacaagatgattaatacagatcttagcagaatcttgaaaagcccagagatccaaagagcccttcgagcaccacgcaagaagatccatcgcagagtcctaaagaagaacccactgaaaaacttgagaatcatgttgaagctaaacccatatgcaaagaccatgcgccggaacaccattcttcgccaggccaggaatcacaagctccgggtggataaggcagctgctgcagcagcggcactacaagccaaatcagatgagaaggcggcggttgcaggcaagaagcctgtggtaggtaagaaaggaaagaaggctgctgttggtgttaagaagcanaagaagcctctggtgggaaaaaaggcagcagctaccaagaaaccagcccctgaaaagaagcctgcagagaagaaacctactacagaggagaagaagcctgctgcataaactcttaaatttgattattcn

SEQ ID NO: 37349 - DNA, 401 bp, Homo sapiens
cggacgcgtggggacaatgtcttcccgtgttccgatcgctttgcccggccggacttcagggacatttccaaatggaacaaccgcgtagtgagcaacctgctctattaccagaccaactacctggtggaggctgccatgatgatttccattgtggggtttctgagtcccttcaacatgatcctgggaggaatcgtggtggagctggtgttcacagggtttgtgtgggcaacccacaataaagacgtccttcgccggatgaacaatcgctaccccacgacgttcgttatggtggccatgttggcagagctatttccttatctccatgctaggaggatgcatgcgctttgcggttgacattactttacctttgctggtgatgtttatccatgcatcagtgtgaa

SEQ ID NO: 37350 - DNA, 428 bp, Homo sapiens
  misc_feature (1)...(428): n = A,T,C or G
cggatcctttgcagcagtgcttcaaaaaagatgaaattttagatgggcagaaatcaggcgaccatctaaagcggggtaggaagaaagggagaaacagacaggaagttcctgcatttactgaacctgacacgactgcagaggttaaaacaccttttgatttggccaaggcacaagagaacagcaactccgtaaagaagaagacaaagtttgtcaatttatacacaagagagggacaggacaggcttgcagtcctgctccctggtcgtcacccttgtgattgcctgggccagaagcacaagctcatcaataactgtctgatctgtgggcgcattgtctgtgaacaagaaggctcaggcccttgcttattctgtggcacttctggtgtgnncnnnnnnnnnnnnnnnnannnnncnnngnnngnnnnnnan

SEQ ID NO: 37351 - DNA, 397 bp, Homo sapiens
tagcccctcaaagccaaggcttgtaaaacctctttgctctagaccaagcttgctcaacccaaggcccacagcccacatgtagcacaggagggctttgaatgtggcccaacacaaatttgtaagctttcttaacatattacgagattttttttgcgatttgttttaagcttatcagctatgtttagtgttagtgtatttcctgtgtggctcaagacaattcttcttccaatgtggcccagggaagccagaagatgggacacccctgcttgagacccacacattcttcatgcctaaaaggtaaacatgccactctttctcacttatataaccaatctatcaccctatagaagaactaatgtgagtataagtaacatacaaaaaaaaactgaaaaaaaag

SEQ ID NO: 37352 - DNA, 427 bp, Homo sapiens
cccacgcgtccgggtgtggtggcgcgtgcctgtaatcccagctactcggtaggctcagtcaagagaatcgcttgaaccagggaatcaggttgcagtgagctgagatcccaccactgcactccagcctggtgatagagcaagactccgtctaaaaaaaaaaaccaggagtgagaaaaataagagtcattgaacttcatttttttaaaaaagaatatcactttgctggcctttctaatatagcatttccccaattatgtacctgtttattgacattttataatgtaggtaaatttttaatcagtttttaattgatacctaattaacctcgagctcttggcctcctgcctttcttcacttctttactcttgcagcattccttcctagtagcttctgtatgtccactacgttgatagccatgactggatgg

SEQ ID NO: 37353 - DNA, 400 bp, Homo sapiens
taggtaaatagggtggtctcaaaagtgctgtataatttcctgaagccttcttcccatttgataagagaaaactgggacactgagaagtgaaggacttgttcgtggaagcagttactacttttttagccatctttccctgagctatagtatctgttaattgtcccatgtccctgctatacaaagcactgggagtaggttgactggttccaaacagccccaaataaagtttttgttgtacttagtttcttttttttttttttggaaaggcagtctccccctccacctgggccaaaaaaggggaactcgggttcaaaaaacaactatatttaaaactgggattttggttaggggtttgccaccaaagccggggggggttttaaaaaacttggcgggagtggaa

SEQ ID NO: 37354 - DNA, 416 bp, Homo sapiens
cgcttccgccggttagccaccagcgggccttctatctaccccacccccaattctgactcagtctaattgcctatggagccatcatggccaccttggtagctggggctactggaccctgcagaggataagggaaccttgaggagacacaagcctttgggaggggtgccgatggacagggaggggtgtgctttccttttgacagaaggactctgggcctcctgcacaagagagcagcctggatctcttaagtgtaggaggccatttggggtctccccagggtattgtccttccctcgggattagtccctgcctctttaacccggtcctgtctcccagctaatctctgtgtaaaccattgatcaggccagccccgtttggctctgcagccttctgacctgaggctctactgctgatgaa

SEQ ID NO: 37355 - DNA, 414 bp, Homo sapiens
aatggcgatgcctaccacctagaactggattttgttctctttttctttcaaattcctctgtctcgcttaaatcttcccgcatcttctcctttctatttaattctgccttccccggctctccttagaacctcatgtccttttctttagctccatttctttcacctcaaagctggccgccaccgctgccacctgctcagagtgaaataatgaaggtggtcaacctgaagcaagccattttgcaagcctggaaggagcgctggagtgactaccaatgggcaatcaacatgaagaaattctttcctaaaggagccacctgggatattctcaacctggcagatgcgttactagagcaggccatgattggaccatcccccaatcctctcatcttgtcctacctgaagtatgccattagtt

SEQ ID NO: 37356 - DNA, 405 bp, Homo sapiens
agacagttgcggtgggtgtcatcaaagcagtggacaagaaggctgctggagctggcaaggtcaccaagtctgcccagaaagctcagaaggctaaatgaatattatccctaatacctgccaccccactcttaatcagtggtggaagaacggtctcagaactgtttgtttcaattggccatttaagtttagtagtaaaagactggttaatgataacaatgcatcgtaaaaccttcagaaggaaaggagaatgttttgtggaccactttggttttcttttttgcgtgtggcagttttaagttattagtttttaaaatcagtactttttaatggaaacaacttgaccaaaaatttgtcacagaattttgagacccattaaaaaagttaaatgagaaaaaaaaaaaaaag

SEQ ID NO: 37357 - DNA, 413 bp, Homo sapiens
  misc_feature (1)...(413): n = A,T,C or G
acctggaccaaggttccatattatataaggagctagaagcattatagctagtgtttgattcactagtgcttacaaattgcccccatgtgtaggggacacagaaccctttgagaaaacttagatttttgtctgtacaaaggctttgcctttttccttcttcatttttttccagtacattaaatttgtcaatttcatctttgagggaaactgattagatgggttgtgtttgtgttctgatggagaaaacagcaccccctctaccccctctagagccaaaaaaaaaaaaagggggcggccttccaaaagaacccttggggggccctatttttacccgggcggggaacngaaaagttttctccttatagggggggaataaaaacaaagttgggaattttggaaaagaaacttaattg

SEQ ID NO: 37358 - DNA, 424 bp, Homo sapiens
attttccttgcattggggaaaatatctttcatatttgtttgctgtaaagatggttttgcaagaataagtcatgaccaagacaaactgccaatacaaaagcccactgatactaattatataatgagaaaaaaatgtatccaactaggacacatatcttttgagttatttggactgaaagcttaagaaaacttggaaaattctattttgtgatctagtcaagccacagttatcaaaggctacattttcagtgtaagataaatggatgagtaaactcaaatatgtatcacgtgtgctttgtatcttaagatgtgtttccaagagcatctgaaattttgtttgtacatgtatcttgatcatttataaagccactgtgatctataaatcaagaaaatccattgtcataaccatttttaaaagtcaaaaa

SEQ ID NO: 37359 - DNA, 392 bp, Homo sapiens
  misc_feature (1)...(392): n = A,T,C or G
cccacgcgtncgcaaagcctcgggactgttttctttttaataaagccacaggcaggcatcgtagctccacagcccgaggggacacaggatggaaaccccaggatgagaagggagcagggagagttccagaaagggggatgaaataggagtattaaaaagctgcgttggtaagtttttcatggaaccaagatttgacaaaggcatctcttatccttggttttaaattcctgctgggagcaaggcctggtatgagcgccctgggtcttgtttttggtgtttcgcttttctgtaaggattaagcagatagggagaagggaaaaggggcctcactttagaatgaatgagtcaccttgtgatttttaaatttttattttaataaagctaatcaattt

SEQ ID NO: 37360 - DNA, 446 bp, Homo sapiens
  misc_feature (1)...(446): n = A,T,C or G
ttccagcttcctaaaatagacagtgggtatcgggcagcagtcactggggctcaagggcagtgagcaagagaaatgtctaaagctgcttctcccaacaccgtccaaagtctccactgcctgagttttgtttcggctggcttgaactcatttcgggtgtgtgcatttttcttttggtacccatgtgagacatgaacaacaggagggagggaaagagcccaggtgggacgtgggacaggcttaggggaaagagcttgtcctatctcaggaacaaaattataggctgtgggcagagggtctgaaaggtgggctttggggtagtgcccaagcctggtcgtgttgccaggagtggtgacaagaaatgcagcttacatcaaacgaacatgtagtgcatgcccactgcctgatggccagatggcctgtangaagagctaccagggcttccagac

SEQ ID NO: 37361 - DNA, 431 bp, Homo sapiens
  misc_feature (1)...(431): n = A,T,C or G
acaacactgtatttgtgtgtgtgcatgtgcctgtttttgtgtgtgtatgtttgtgggaaataattatgtttgtttccgcatatattcatttttaatgcattctgtaacttttctcgagtggtggtcattgagggtagggaagattttattttttaagttgtcgttaaggtatttcattagtgttcctgagtgtaaaacagttttttcccaaatacttatggcagataagagcatttttgtaaataataaactagcaccgtttgggtaaatttgcattattttttggacaggttcattgtcatgtaaaacaaatatctcaaaattcattttacatttagcaaaggtgcaacatttgtttttggagtttgagagatattttccttgtcttccatcattcaataaatactaaaattgataaccacaaaaaaaan

SEQ ID NO: 37362 - DNA, 463 bp, Homo sapiens
  misc_feature (1)...(463): n = A,T,C or G
nattgatcccccctgcggnaccatcgacggaccttccgggncgacccacgcgtccgatctgcatcctggaacttggtcacttgtgtgaacaatgtggagcggtccagtggccagccgttcttccggcaggtggcctgcaccagcgccgtgaggtaggactcagggatgtgcagccccgagagccacatcacgctgggctcgctctcggtcacctggagagaagagaggacaagtgctgggagcctggggctgccatccaatgccaggtcaaagctggcctggaagtttagtttatgataaaagacatatttcacctaagtggcaaaagatggcgttggcacaactggccgcctgtctgagaaaaacaatctggactgccacattccaggtagatcaaagatttagatataaaaataaaataaaccacaaaagtactgggccacatctccaatgaatgctttcn

SEQ ID NO: 37363 - DNA, 409 bp, Homo sapiens
gttgcaaggaacgaatatatgtgattatcactgtaagccacaaaggcattcgaagagaatgaagtgtacaaaacaactcttgtagtttactgtttttttaagtgtgtaattctaaaagccagtttatgatttaggattttgttaactgaatggttctatcaaatataatagcatttgaaacattttctaatagttatgatacttatacatgtgctttcaggaagttccttggtgaaacaattgttcaggggggatctaggtaattggcagattctaaataatataatttccagatagtaattttaagagtactcatcgctcttgccaaataagttcagggtattcaaatcttggactagtcctgcaaggtacaaagaataaaaatcccagtgagatacttggaaaccac

SEQ ID NO: 37364 - DNA, 412 bp, Homo sapiens
gcaggaaccataccaactgctctttaagttccttagtcctgggtcccaatgtgtagaagtgaacactctgtgactttgagtaatacaggaagggagaggattgggaggatgagacatcactagaggtgggctgtagatgatgctcagagttcagtcatgaagccagaccacaaatctctccctgtcacccaacagcagacagtcctactgtgtgccaggcacatgctggctctgtggtaagctcagttggtaacctcaatgaacactacacctgccacacaggacaggtggacaagtagacaggcaatgacaacacaatgtggagggtgagcaacagggacatgtagggagtgaggcatacagcagggacagctaacccaggctgtggggtcaggggaagctcccaggggta

SEQ ID NO: 37365 - DNA, 431 bp, Homo sapiens
cccacgcgtccgctcaatttaggaataggaatgattgttttacagctaagtgcgctctcagagtcttttgttttacacccctctcaagtttacctttagatatttttcttgttgtttaatattttgtgacaaatttggcaacttttaaaaagttgtttgaattgaatagtgcataaaattaatagatgtttttcagaaaatccattattaagagtagaggaatgaggagaaatattcgttctaaagagaatcaaaaccacaatgagagattgtcttacccccgttagaatgacagttaccaaaagacagtaacaaatgctgacgagaatgcagaggcaaaggaacgtttaaacactgttagtgggaatgtagacttgtacaaccgttatggagaagagtatggaggttcctgaacaaactaataatagaac

SEQ ID NO: 37366 - DNA, 442 bp, Homo sapiens
  misc_feature (1)...(442): n = A,T,C or G
cccacgcgtccggtgagatacagacaagcgtgtagtcatgaagagctccaccatgcagagagcaggtggataaagagttaccaatgaaaatcaaaagagaaattccaaagtggcagaagaaaagccaaattggcctggcacagtggttcatacctataatcccagcatcttgggaggctgaggcaggagaatcgcttgaggccaggagttcgataccagcctgggcaacatagtgagatacccatctgttcnnaaaaaaaaaaaaaaaaaaaaaaaaaaaaaaaaaaaaaaaaaaaaaaaaannnnaagggggggggcttttttaaaaaatcccggggggggccccaatttaccggggggaaaaattttttttttttttttttttagggggggaaaattaaagggcttggggtttttttgaaaaaaccccttttttgggggg

SEQ ID NO: 37367 - DNA, 404 bp, Homo sapiens
ctcttattagctgcatacagttctgtcttttggtggaaacagctctactccaacaaccctgggagttcattttcctcgacccagtcacaagatcatatccaacaggtcaaaaagagttcttcacggtcttggatataagtaactcttggcctcagaggaaggaaaagcaactcaacactcatggtcaagtgtgattagactttcctgaaatctctgccattttagatactgtgaaacaaactaaaaaaaaaaaagcttttgttttgtaaaaaaaaaaaaaaaaaaaaagggggggccgtttaaaagaacccttgggggggccaaatttaacgggggatggaaaggaaaaatttttttccttatggggggggttttaaaacccccctggggaattttggaaagga

SEQ ID NO: 37368 - DNA, 425 bp, Homo sapiens
cggacgcgtgggctctgcagtaaatctcgcaggggaatttgcactattacacttgaaagttgttattgttaaccttttcggcagcttttaataggaaagttaaacgttttaaacatggtagtactggaaattttacaagacttttacctagcacttaaatatgtataaatgtacataaagacaaactagtaagcatgacctggggaaatggtcagaccttgtattgtgtttttggccttgaaagtagcaagtgaccagaatctgccatggcaacaggctttaaaaaagacccttaaaaagacactgtctcaactgtggtgttagcaccagccagctctctgtacatttgctagcttgtagttttctaagactgagtaaacttcttatttttagaaagtggaggtctggtctgtaactctccttgt

SEQ ID NO: 37369 - DNA, 415 bp, Homo sapiens
cctccctgccccacgtagagacacagagtgatgtgaggcgttggctttttctccaagaaggtacagatacctcagattcgggaaactcaaaatcaaaagacttagcttctaggataaatacttctgatgaaaaatccgctgaggagcataccccaaaccagacatatgcttaggattcatgctgagatatcaattggtttccccttctttttaaaatacgtccagttcttacccagttaacatgaagaaaccactgtctctagaagaaagcttgttttgcagtattagtgaatcactgaatagcttaagtatgactatctaagttataagttagtctttagtgggttttaaatagtttttctgacccttctgaaaaataactacataagtgcttcttggtgctgggtgagaaata

SEQ ID NO: 37370 - DNA, 408 bp, Homo sapiens
cccacgcgtccggccaccccggtcaaaggatgctgagtccggagcgcctagccctaccggactacgagtatctggctcagcgacatgtcctcacctacatggaggatgcagtgtgccagctgctataaaacagggaagatattagccaatatggaattgccaggctcttcactgaatattttaacagtgtatgccagggaacacacattctctttcgagaattcagcttcgtccaagccaccccccacaatagggtatcatttttacgggccttctggagatgcttccgaactgtgggcaaaaatggcgatttgctgaccatgaaagaatatcactgtttgctgcaattactgtgtcctgatttcccgctggagctcactcagaaagcagccaggattgtgctcatgg

SEQ ID NO: 37371 - DNA, 401 bp, Homo sapiens
agcattcgtcccgagatgtttcgctccgaggccttagctgtgctcgcgctactctttctttctggcctggaggctatccagcgtactccaaagagtcaggcttactcacgtcatccagcagagaatggagcgccaacacccctgaacagctatgcgtctgggttgcatgcatgcgacattgaaaatgacttactgaaaactggagagagaatagagaaagtggagcattcacacttggctttcagcgaggactgggctttctatctcttgtactacactgaattcacccccactgaaaaagatgaatatgcctgccgtgtgaaccatgagactttgtcacaccccatgatagcccaatgggatcgagacatgaaagcaccatcatggaggttcgaagatcc

SEQ ID NO: 37372 - DNA, 419 bp, Homo sapiens
acttctcggtgtgcaggaactgtaaaagacatgtagtctctgccaacttcaccctccatgaggcttactgcctgcggttcctggtcctgtgtccggagtgtgaggagcctgtccccaaggaaaccatggaggagcactgcaagcttgagcaccagcaggttgggtgtacgatgtgtcagcagagcatgcagaagtcctcgctggagtttcataaggccaatgagtgccaggagcgccctgttgagtgtaagttctgcaaactggacatgcagctcagcaagctggagctccacgagtcctactgtggcagccggacagagctctgccaaggctgtggccagttcatcatgcaccgcatgctcgcccagcacagagatgtctgtcgcagtgaacaggcccagctcgggaaagagtctgat

SEQ ID NO: 37373 - DNA, 422 bp, Homo sapiens
  misc_feature (1)...(422): n = A,T,C or G
ccagcatgggcaatagagcgagactctgtccccccggaaaaaaaaagaacaagggctaaattcaaatcaaattttccctgtaccctaagaaaaataattaggccgggagatgtttgactaagtgagtaggcattgttctgtgacggtctgagccccagacctttcctctggatgaatgctgtcccaggtaatgaaatgacttcacttattaatatataggtacacagagttcaggtagatgtggaatgaatggggactcgccccgtctgcccttgaatgtatttagtggtttatgtgaaatgtacctttcaaagttgtctgtatgtttcatactctgggggtgggaatataaatcattgcagcctttttgtagggcactttggcagtactcatcaaaatatgcgatgtgcagatgcttaccn

SEQ ID NO: 37374 - DNA, 429 bp, Homo sapiens
agaccttataaatgtaagacatgtgggaaaggcttttattctcccacgtcatttcaaagacatgaaaaaactcacactgcagagaaaccctatgaatgcaagcaatgtggtaaagccttcagtagttccagttccttttggtaccatgaaaggactcacactggagagaaaccctatgagtgtaagcaatgtgggaaagccttcagatctgcctcaatccttcaaatgcatgctgggactcaccctgaaagaaagccctacgagtgtaagcaatgtgggaaagccttcagatctgccccacaccttcgaatccatggtagaactcacactggagagaaaccctatgagtgtaaggaatgtgggaaagccttcagatctgccaagaaccttcgaattcatgaaggacacaaacacacgtaagaatgcact

SEQ ID NO: 37375 - DNA, 491 bp, Homo sapiens
  misc_feature (1)...(491): n = A,T,C or G
ncgtgncaattgatnactgacggacctgcgcacggaaccccgggncgacccacgcgtccgcccacgcgtgcgnccacgcgtncgatccagttttcatttttttacgtcttgcctataagctaatatcatagataagggtgtttaagacgtgcttcaaatatccatattaaccactatttttcaaggaagtatggaaaagtacactctgtcactttgtcactcgatgtcattccaaagatattgcctactaagtaatgactgtcatgaaagcagcattgaaataatctgtttaaagggggcactcttttaaacgggaagaaaatttccgcttcctggtcttatcatggacaatttgggctaaaggcacgaaggaagtgggatgacctcatgaggtcaccttttcttgattccagatacatatgggctgataaacccggcgtgacctcatgaaatgagttgcagcagaagtttatttttttcagagcaagcga

SEQ ID NO: 37376 - DNA, 306 bp, Homo sapiens
aaaataagcaaaagcgtcccaggagccgtactctgacagctgtgcacgatgccatccttgaggacttggtcttcccaagcgaaattgtgggcaagagaatccgcgtcaaactagatggcagccggctcataaaggttcatttggacaaagcacagcagaacaatgtggaacacaaggttgaaactttttctggtgtctataagaagctcacgggcaaggatgttaattttgaattcccagagtttcaattgtaaacaaaaatgactaaataaaaagtatatattcacagtaaaaaaaaaaaaaagg

SEQ ID NO: 37377 - DNA, 415 bp, Homo sapiens
ttgaaacataattaggctatttacataaaaggcatagtttgaatacaaaaaaatggcatagctggaagaatgtaagtttagattatctcacttttacagttacacatttttaagttatttgacctcggtattaaaaatcctcgtgttccattttatgtgtagtccagaaatactttttaaataactggtacagcgatgtccttatatagagagtgttgaaagcaaaaggctctgaaatctatcattacttgtagtccagtttgccctcctttttcagcatgtctactctccatgttcaaaattttccatggctaattttttgtccttaaattcattttcccctgccaccctgtcaaccagccaatcagtcaacaaataacttgggtgggtactatacatagggtcaccaattcat

SEQ ID NO: 37378 - DNA, 424 bp, Homo sapiens
gctcatacctccagtacaatggtgaatagtggtataagtatgaaattctcgtcctgttttcaaacttgcagataaagcccctagtcattcaccattaagtatattagcttttggcgtggagattttcatcttggctcactgcagcctcaacctcttaagctcaagtgatcctcccaccttaactgcctgagtaagtgggacaataggcatgcaccaccatgcccagataatttttttttttaatattttgtaaagatggggattccctatattgtccagaatgggcttgaactcctggttttatgcagtctttccaccttcacctcccaaagttctgggttacaggggtgagccactggcccgggccaattttggtttttatggaggacttttaacaggtctcaaaagttttcttctaatattg

SEQ ID NO: 37379 - DNA, 420 bp, Homo sapiens
  misc_feature (1)...(420): n = A,T,C or G
cggacgcgtgggctgcagtagtttccaagtgtgtaacttggctttagtatttatcagttgccagaaagaaacaggttgtcatttggaagtttttgtggttattttttcccatttttattcttcagataaaagcagtaccccaaaatagaaaatgaaaattttcatgaaacaaagagaactcccttgttaaaaccagcttattaactctgtattctgtcaaatgcatttttttctaacaactgaccatggatgttgtgaaggtgcattttaatttaaacatggaaaagatttttttcataattacatactagaatgtaaaattataattttgccatgacttaaagagcacagttgatatcccaaaggttttgatgctaagaagctacagttattctaaatgcactanaatgtttgaggcaa

SEQ ID NO: 37380 - DNA, 406 bp, Homo sapiens
cagatttcaagctgagttggtgttgggaccagcagaaagcgaacgtccagccatcacacaggactgtaagaggactctgagctacgtgccctgtgaagacccccaggctttgtcataggaggtcgttcagcttccccaaagtcagaggtgatttgatttggggaagactgaatattcacacctaagtcgtgagcatatactgagttttacttacttatgggttgccctccaagttctctatctcatacacacacacacccttgctgcagaatcaccagacacctccatggctccagctatgggaacagctgcattggggctgcctttctgtttggcttaggaacttctgtgcttcttgtggctccactcgcgaggcagctcggaggtgtggactccgattgggctg

SEQ ID NO: 37381 - DNA, 402 bp, Homo sapiens
  misc_feature (1)...(402): n = A,T,C or G
agcggaaagggtgagccacagacacccttcatttactgtgcgcgcccggactccgggtgttctcccgttccgctgcccgccctgtcaccatgacggaacaggccatctccttcgccaaagacttcttgggcgtaggcatcgtcgccgacatcttcaagacgggcgtggctccgatcgagcgggtcaagctgttgctgcaggtccagcacgccaggaagcagatcgccgccgacaagcggtacaagggcatcgaggactgcattgtccgcatccccaaggagcagggcgagctgtccttctggaggggcagccttgccaacgacattcgctacttgcccactcaagccctcaacttcgccttcaaggataagtacaagcagatcttcctgtggggcgaggacn

SEQ ID NO: 37382 - DNA, 464 bp, Homo sapiens
tcgcggcgacatggccaaacgtaccaagaaagtcgggatcgtcggtaaatacgggacccgctatggggcctccctccggaaaatggtgaagaaaattgaaatcagccagcacgccaagtacacttgctctttctggggcaaaaccaagatgaagagacgagctgtggggatctggcactgtggttcctgcatgaagacagtggctggcggtgcctggacgtacaataccacttccgctgtcacggtaaagtccgccatcagaagactgaaggagttgaaagaccagcagacgctcctctactctttgagacatcactggcctataataaatgggttaatttatgtaacaaaaaaaaaaaaaaggggcggccgttttaaagaacccttgaggggcgccaattttacgcgggaaggagaggaatagctttccccttataaggagcggtattataaggacgtgggag

SEQ ID NO: 37383 - DNA, 426 bp, Homo sapiens
  misc_feature (1)...(426): n = A,T,C or G
agaatttcactttgaacccaatgaatattttacaaatgaagtgctgacaaagacatacaggatgaggtcagaaccagatgattctgatcccttttcttttgatggaccagaaattatgggttgtacagggtgccagatagattggaaaaaaggaaagaatgtcactttgaaaactattaagaagaagcagaaacacaagggacgtgggacagttcgtactgtgactaaaacagtttccaatgactctttctttaacttttttgcccctcctgaagttcctgagagtggagatctggatgatgatgctgaagctatccttgctgcagacttcgaaattggtcactttttacgtgagcgtataatcccaagatcagtgttatattttactggagaagctattgaagatgatgatgatgattatgatgn

SEQ ID NO: 37384 - DNA, 82 bp, Homo sapiens
cgcacgcgtgggctaatgcgtgctgggcttaatacttatgtgaggggtggataggtgcatactaccaccctggcacatgtat

SEQ ID NO: 37385 - DNA, 424 bp, Homo sapiens
  misc_feature (1)...(424): n = A,T,C or G
cgcagctataagttattagtttttaaaatcagtactttttaatggaaacaacttgactaaaaatttgtcacagaattttgagacccattaaaaaagttaaatgagaaaaaaaaaaaaaaggggcggccgtttaaaaggatccttggggggccccaagtttacccgggcttgcaaggtaatagttttttccttataggggggcaaattaaaacctccctgggaatttttggaaaggaaccttatttttggggggggacatattgggccaacccccctccagaaatttaagcctttagggaaaaaaaaaaattttaaagggaaaaaggggtaaaacaacctgcatatcctggttgtttggagaaaatggggannnngcnanaccacttnaaangcctccggngcaaaaaacacacccccttcctcg

SEQ ID NO: 37386 - DNA, 487 bp, Homo sapiens
  misc_feature (1)...(487): n = A,T,C or G
cgcgcccccccaggatagacatgcgttgcggcaccggaacggaagtnccggatcgacccacgcgtgcgaagcaaccatgttctcctgatacaagagaatataatgtgtgatgacaatatgggtttgctgtatctgctcccatagctttgccataggaaaaaaaaaagtggaaagtttcttttaagatggaattcataaaagggaaaatacggaggaaaaaaggtctcactccaacttgtgaatcagtttaggagttcagatattaatagtaacaatacaggaaaaaggggaactccaacgttgggattactgcctgaggcttgtaccaagtgctttctgtggaatgatcttgttttgctaacaaacggcttgctccaaatgaacagaagtaggttggtgcagttctcgtaacaatcagcacaacttatgatgacacaatccattaattccagctgcgggcatagatcacatttttaaaatgtaaaan

SEQ ID NO: 37387 - DNA, 396 bp, Homo sapiens
  misc_feature (1)...(396): n = A,T,C or G
aaaaacaactagccgggcgtggtggcgggcacctatagtcccagctactcgggaggctgaggcaggagaatggcgtgaacccgggaggcggagcttgcagtgagcggagactgcgccactgcactccagcctgggcaacagagtgagactccgtcaaaaaaaaagctctcctccccagatttgtgaaccttgtgactgttcaggggacacctcacatattgctggtgggaaggtcacgtggagacagctgggcaaagccttggggcgttaaacacagagtcactcatgacccagcacttcctctcctatgcaccttgtgcaccccagatcaatgaaacctacatccacacagaaacgtacacaaatctctcagcagcactgttcacagtagccaan

SEQ ID NO: 37388 - DNA, 476 bp, Homo sapiens
  misc_feature (1)...(476): n = A,T,C or G
cccacgcgtncggacgcgtgggcaagaagcatcaccaaactttgagaaagcttatactttacctgtgttaccatcagaaaaggactttaatggaagtgatgcctctacccagctaaatacacattatgcatttagcaaactaacttacaagtcttccagtggccatgaagttgagaatagcacaactgatactcaggtcatttcacatgaaaaagaaaacaaactggagagtttggttttaactcatttgagtaggtgtgattctgaattatgtgaaatgaatgcagggatgccaaaaggaaacctaaatgaacaagatccaaaacattgtcctgaaagtgaaaagtgtttgctttccatagaagatgaggaatctcaacaaagcattttatcaagtctggaaaaccattcacagcagtcaactcaaccagaaatgcataaatatggtcagttagttaaagtagaattagaagaca

SEQ ID NO: 37389 - DNA, 432 bp, Homo sapiens
  misc_feature (1)...(432): n = A,T,C or G
ccacatctcccgccagaggctgacccgcggctgattgagtccctctcccagatgctgtccatgggcttctctgatgaaggcggctggctcaccaggctcctgcagaccaagaactatgacatcggagcggctctggacaccatccagtattcaaagcatcccccgccgttgtgaccacttttgcccacctcttctgcgtgcccctcttctgtctcatagttgtgttaagcttgcgtagaattgcaggtctctgtacgggccagtttctctgccttcttccaggatcaggggttagggtgcaagaagccatttagggcagcaaaacaagtgacatgaagggagggtccctgtgtgtgtgtgtgctgatgtttcctgggtgccctggctccttgcagcagggctgggcctgcgagacccaaggctcactgcagn

SEQ ID NO: 37390 - DNA, 362 bp, Homo sapiens
gccgggcatggtggtatgctggagtgtgtctgtaatcccagcttcttggaaggctgaagcataagaactgtttgaatcttggaggtggagactgcagtgagccaagactgcatcactgcactccagcctgggtgacagagcaagactgtcataaaaaaaaaaaaaccaaaaaaacccaaaaggctttatttttgggattctcaaaaactggcccttaaaagtcttcctaataggcctcaaactgactcaaaaatggaattattttggtttttaaggacaaaaaatggacaatggcatatattttaaattcagattactcaaattttgtattcctaacaaaaattggcatattaccagagtat

SEQ ID NO: 37391 - DNA, 390 bp, Homo sapiens
gcttaggcctgggagtttgaggctacagtgagctgtgattgcgccactgcactctagcgtgggtgacagagaaagaccctatcttaagaaaaaaaaaagaaaagaaaaagaaaaaacaaccaaaaaaaacacccaaccctatataggtattattattacttctataggacacatagaggtttggaaagattaaatcacttgaccaaggtcacaaaataagttctgaggctgggatctgggattcagtcttattatatgcccttcctctaccactccctaaaacttctcattccctcaatccccatatatcatcttaaaatctgcaataaatagccccatacattcgttggcacttaggaaactgttaccagatggctgagtaactgtatt

SEQ ID NO: 37392 - DNA, 378 bp, Homo sapiens
ctaaagtcaacgacaaggcttattgaggctgagtttgcaacagatccgatctgggaggtagaaacaaaaatgactgaacatctttttatcccccaatcgttacaaagcctaaataactctaaacgggatgggagggcaaattttaggtcagttgacatcctggagaagatatcctaggtcctgtctcattccctagaccgcataacactccaaccgtgtaaatctcaggaccctgaagaagacagtggtaggggagaggaggggagctagcttccaacctactccacacttgactcccataggacaacagtaagtgtaagggcatttgcaaaatcaagtggaaagtacctctaggctggagaagtaggatattctagc

SEQ ID NO: 37393 - DNA, 384 bp, Homo sapiens
tttatgaaaatctcttcctctgaccccagcatcgcccctccccagccagagtttgtagcatggaactgcatccttcactgttaacgtggcctcgcgtattctgtatatgggatggacaggaacaagctcatctttttttttttttttttttttttaaaaaaaaatttttttttttccccccaggtggaggggagggggggaaatttaatttatttgaagttttgccccccagggtaaagccatttttctgcctaaacccccggaaaaaggggaaataaaggcccccccccccccccccgggtaattttttgtttttttaaaaaaaacagggtttccttgggttacccaaaaagggcttttttccccggccttggaaaccccccc

SEQ ID NO: 37394 - DNA, 382 bp, Homo sapiens
cttttaaatccaaacatagcataaatgaaagaagatattctctatcattgtaatctcaccactagcagacacaatttcccagccttgtttggagatgtgaaggtaagaggccaggtgttgacaccttggaatttgccttaagatcaacctccccctatattatacaggtagaccaacccacaaatgcttgagagaccacagctgacaggtttatgaagacataatgtttaccaaatttttgcaagtttttaactttcaagtatgtgaactagcaagtaaaactatcctaagtagtgccaaattgttccctaattcatcttttgcaaatttagtgcagtcatgcattgtttaactctggaaatacggtccgagaaatgcagcc

SEQ ID NO: 37395 - DNA, 396 bp, Homo sapiens
cgacattgtcaacttcaattggcaccatgagtctaagggatgttgtcttacagagaaatgagacccagagagctcctgccacttgcccaagaacacacagctttcaaatattcatgctggcacacagcttttaaatactggtgctgggatccaccaggtaccgtctgccattctgcctgtgtgttccccactattccacgtgctgctgaccccacgtgaggcaaggcttcttcccatctgccaggaaccttgaggtcactggtgaatccttgagtcctaaggaagagaggatttggggaaggaagtgcaatggggtgtgagagtggcagccttgacaggacctgagggttgtggctcccttcctgcgagtctcaagacaagagggtgcttgatgga

SEQ ID NO: 37396 - DNA, 382 bp, Homo sapiens
  misc_feature (1)...(382): n = A,T,C or G
gctactcaggcggctgagccatgagaatcacttgaacccaggaggcggaagctgcagtgaggtgagatcacaccactgccctccagcctgggcaacaaagcaagactctgtctcaaaaaaaaaagaaagaattacttttctttgatcggaatttctgaatttcatacatttttcttccaagggtcattttttttttaagggaacataccacacactcaaaacataatgacttagcttcttgtaaatataaaaatgggggaagttaaggtacattagttatagaacgaaggaagctagggcattcagggtcacatatgaactcaaggccttagttacttgatgggaattccagnattagcaacagtgtatttccctcatgctt

SEQ ID NO: 37397 - DNA, 369 bp, Homo sapiens
ggaacctttgttattaaccaccactgatactggctctttctggaggaggcacagtccttgtgttacacattttctgtattctgcatacttactgccttgtatgtagttggttgttgatatttatcaatttgatgtcagaagaggactgtcagtaaaacgatgcgtgtatgtgtgtatgtgtgattgttgtaagtgctatagagcgtttaggaaggtccagtgtggtcagcagggcttcatggagcatctgaaaaggggtttggtttatagaatggctatgatttccagatatggagaggtgtgcacatggtacctgccttgtagggcactaacatgcaggaggtaactattcaaagcatgttcaggaag

SEQ ID NO: 37398 - DNA, 372 bp, Homo sapiens
gtcgacgcggccgcggaaaatgttgagcaagtctgatttgattcccatggtgacatttttagccattatgtaacaaattctgacagtttacccttaaaattaaaaacctccagtcctgtctttttaaagggtagaaagaaggttaggtataggatagctttttatttatttatttatttatttttgtacaaagggagcctatgtaaagctgccagatctgaactttctggtgttttgctgtaatgttagtaagatttcgccttaaaatattttattttgagtatatacgtttggtcttagagtgtcttggtggatttccgcttaccacccatcactttctgcattttaaaggcttaaatactttattgctgg

SEQ ID NO: 37399 - DNA, 386 bp, Homo sapiens
  misc_feature (1)...(386): n = A,T,C or G
ccgccgcagccaccatatataaagcgcacgcactttcccttggagaggtcgaagtaccaacgaggcatcacggcccggcagggccccgtcatcgcctcctgggagcagacagctttgacatcatgagtaatttccttgtctgacatggtgccgtcgctgccgggttcagtaggattctcctcattgtagtcatctcctttgaaggtgtcatagtagtaatctcggtcctccaccacttcctccccttcttcctcatcctcatcatcctcatccacagctgcttctgtgaagtcttccagatctgcttcagtaggaaattcacttttataaacatcatagncttcctcttcatcttcctcttcctcttcatcttcctcttcctcttc

SEQ ID NO: 37400 - DNA, 373 bp, Homo sapiens
cggcaaagcaggaaggaagtgacccaggccactcagcttaaagccatacgtcaacgaacttctataggtgtccatactactagacagcgccggttgctggaccttagagaacgaaggtagcagcaagagtctgttacacatggcgaacctgaccggcgaaggacgaaggaattgacctatgccactcagactaaggccatttctaacgggactagcatcactgaacagaatcctgccaggagaagggcagacgccaagggcaccgcaagctggtcggaagagtctcttaaacccagtgacaatgaacaaggcttgcctgtgttctccggctatccgcccatgaagagactttcatccaccaatgcaggcggga

SEQ ID NO: 37401 - DNA, 375 bp, Homo sapiens
ctgattaatggaataacatctgttttgacttaaatgtaggttccatgagggtgcggcggtatcttgctttttcacccacgtatgtgtcacctagcatagtgcctggtgcatagctgggactcgaaatatttgttgaacgtacaagaattcctgaattccaagggcttgccattaatatggtgttcttgccccgcggccagctttctcactcagcctgctgcacgtgttggatggggctgggtgttgagacttgtcccgcccatctctcggtggggaatcaggatcccatcaaggtaaatcagtgcctgaagatgtggctttggcttctgtcatttctgttaaatcctctccagccagctctgacccttgccgagg

SEQ ID NO: 37402 - DNA, 378 bp, Homo sapiens
ttttttttttgagacaggatctcactctgtcacccaaaaaaagacaaaagaaaaaatcctaaatcacaatttttatcaaacagttcaaagttttcaacaaaaaaggttacaaaatttctctttattctagtcctgaattccttctccaaaattttaatacaaaacgaattttcaggcacaaatagtcaccaaataatgcataccgtaatttagcagacttaaccaaacaataaacacccctacaaaagggtcactattttatcactttgtgctggactcttctccctatacatctttaataggggccacttctactttacttctagcattcaatttagacatctcaaccccaaatttaataatctgttttatcaaaca

SEQ ID NO: 37403 - DNA, 391 bp, Homo sapiens
  misc_feature (1)...(391): n = A,T,C or G
gagaattcagtaccaaccaagcttcagcccactttcacacccactgggcaataaactttccatttccattctcctagctggggatggggcatggtcaaacttagccatcccctcctcagcaaggcatctaccggcccctcacagagacagtactttgaaactcatgttgagattttaccctctcctccaaccattttgggaaaattatggactgggactcttcagaaattctgtcttttcttctggaagaaaatgtccctcccttacccccatccttaactttgtatcctggcttataacaggccatccatttttgtagcacacttttcaaaaacaattatataccctggtcccatctttctagggcctggatctgcttatagagcangaa

SEQ ID NO: 37404 - DNA, 391 bp, Homo sapiens
  misc_feature (1)...(391): n = A,T,C or G
caaagacaaagaaacaaaccgggatttcctaccaagtggaagaattgaaagtacaagaactagggagtctccactagataccacaaatttttctaaagaaaaagacattaatgaattcccactctgttcacttcctgaaggtgttgaccaagaagtcttcaagcagcttccagtagatattcaagaagaaatcctttctggaaaatctagggaaaaatttcaagggaaaggaagtgtgagttgtccattacatgcctctagaggagtattatctttcttttctaaaaaacaaatgcaagatattcccataaatcctagagatcatttatccagtagcaaacaggtatcctctgtatctccttgtgaaccgggaacatcaggctttaatagn

SEQ ID NO: 37405 - DNA, 381 bp, Homo sapiens
acctgaatcccaggaaccctcaatgaggtcttcaagatgaagagactgctgccagctaccagcctggctggccctgtcctgtccaccctcattgccccaactcccatgttgttttgtgaagataaaagctgggatctttttctttttttttaagtctcacaagacatggggcatctccacaaatttaagttcctgtccatttggaaatttgtttctatgtgtacaggttggcagaaaaaaacaaaatttttgtgttgattccaaattgtgatttacgcacgaaaaaaaaaaaaaaaaaaaaggtcgacgcggccggcgtaacatcccctggaataacaattttccatgaacgagatggcaacaatcaacaacccccatttt

SEQ ID NO: 37406 - DNA, 385 bp, Homo sapiens
ttgatgataaagctggcatctgtggccactaggataaggcactggacagctgagtgtaggccaatccagaggcggaactccatgtagtccaggccattgcctttgctgaagtcgaagaggagcttctcaaagatgaggatgggccccgtgctgctgagaatgatgagaggctgtcccgagaagaggcagaacaaggagccagccatggcagtgcccaggaagctctccatcactccctgataattgtcggtggcatcccccagaagcccaccaaaggtgatcgcgttggtgatacagccgaggtagatgaataggatggcagagatggactgaatgtggaagccatcatagaagtcacttgggaaccagggcaacttcctcttgg

SEQ ID NO: 37407 - DNA, 389 bp, Homo sapiens
  misc_feature (1)...(389): n = A,T,C or G
ctgccagtagcatatgcttgtctcaaagattaagccatgcatgtctaagtacgcacggccggtacagtgaaactgcgaatggctcattaaatcagttatggttcctttggtcgctcgctcctctcctacttggataactgtggtaattctagagctaatacatgccgacggctagtttctgctgtctgaaaagaaacatacttttacttttagaaaataccaaacaggtaaaatggcaaataaattctagaaagaaatagcagtgcctttttattatcaccaaataaaatgttgaaagtcttaaaattttctcactaatttgaaaattccaaatattnttcaaaacaggatttctcttagtccttagaacgtgacttgtgaaatagaag

SEQ ID NO: 37408 - DNA, 370 bp, Homo sapiens
cagacgtccgcatcttgaattggagctcctggagtgaagccattgaatttggtaagcgttgggcggaggtaagggatgtttgtgccgtctgcggccaccctgcagcaggcacagaggtcaggtgctctgtcctgggcgctgagatcgagttgagcacgtcgctgggagtagtgtcaggctctgagcttatcgctgaggctcaaaagaaggaggtggtctcgtacttggtcccgcaacattgctttgctgatgttttttcaggacggatgagttggctcccttaataaccagagaagggccaggtgcagcggttcacgcctgtaatcccagcctcccgagtagctgggattacagacatgcatcacgcttg

SEQ ID NO: 37409 - DNA, 377 bp, Homo sapiens
taaaaatacagcttttattctgagacattgaccttcactagagtgggacctgtggccccagcctggctggagaagcagtcccagggcctgagtgacaccatttccctttcctgaaataggaacaagttattccaaaggagaaaggagagcccagagagatctgtacaggacctctcttgcacatggtgactggaggcagagggtggggagctggagaggagtccagtccctccaacaaatattgagggcttcaaagagctcttcctggacgtttctcttaatctggatttaaaagggacaggaggtatcttagggtccaagaacataacaggaatgggcaactctagaagtgtttgtgtgtggaaggccctaacctg

SEQ ID NO: 37410 - DNA, 370 bp, Homo sapiens
atgagatttatttggttacagtgaataacctggacaaaatgttgagaagagttgttaaaacaagtttacattaaatatactaacaattacgtttggttacatatttgtaagtgatggttatttagaaaaactgcgtagaaatccaaaccttaaatattgtgcaaatcaaatcattagcttctcttctctaataaagtagggtgactagttcttggattaatctaactataacattaatgtagcacttgattatcttatggaataattctctatctcatctaagcctcacaacaaccttgtaaagtattatccccattttatggaggaagaaacaggcttagaagtggaaaggtaggttctctgctcgcac

SEQ ID NO: 37411 - DNA, 356 bp, Homo sapiens
  misc_feature (1)...(356): n = A,T,C or G
tttttattgagacacatcttgctgtgtcacccagggttttgctctgttgccacagcttactgcagccgtgacccaggctcaagtgatccctcccacctcaggcccctctccccgaccagtagccgagactacaggcaggcacagactggcaccaccacactcggctaattttttttagtagagacagggtttcactgtgttagccaggatggtctcaatctcccaaccttgtgatccaccccactcgggctnncaaagngctgnnnaaaaaaanaaaaaaaaanannnaaaaaaaaacacaaaannnnaaaaananaaaaaaaaaaaaaannaaaaaaaaaaanaaaagaaggggg

SEQ ID NO: 37412 - DNA, 397 bp, Homo sapiens
gttttttggagttcctttgaaaggctctgcttttagtcagagtagctattttaagaactcaaatgccttctgctcaaaataatttgtatgctatccaagcatattctggaccccttcaatgtgtgtgtgtgtgtgtgtgtgtgtctgtgtgtgtgtgtgtggtgtgtgtgtgtgtattgttttcaagataaacacctcaacttccctaaagcttctctaagggatagctccttctcttcccacctgtagatgggaagaagaattgagaacctttcacactactttttaggtacaagtttaaaaaatttgctaagagggaaggtctaatgttaagtgttcttatgataatcaatcaatccaaaataaatatctattttgaaagtcaaaaagaagtgag

SEQ ID NO: 37413 - DNA, 391 bp, Homo sapiens
  misc_feature (1)...(391): n = A,T,C or G
ttaaagatggatgtttgtcagaaagtggatttacttggagctagccgctgcaatatgctatctcattcgctcactacctaccagagaacactgcttggattctggaagaaaacagctcgaatgatgtcccaaattcatgaagcctgtattggctttcatccgtatgattttgtagctctcaagcaactacaagacacgccaagcaagattagtgaagacaataaagatgaacaaataggcggttttcttactgaacagctcaataagctagttttgtctgatgaggaagcaagctttgagagtgaacaagcaaacaaagatcacaatgaaaaacattctcaaatgagagaatttggagcacctcagttttctaactctgaaaatgttgcan

SEQ ID NO: 37414 - DNA, 121 bp, Homo sapiens
agagtgagtacagctaagcgaactttaagtaaaaaggaacaggaagaattaaagaaaaaggaggatgaaaaggcagctgctgagatttatgaggagtttcttgctgcttttgaaggaagtg

SEQ ID NO: 37415 - DNA, 374 bp, Homo sapiens
tctgtttttattttgttttggtcttcctttatagacacgacaaaaacaaggattaactttccaaatactcatggtgcacaagaaggttatgtatgcacagtatttctaatttattcaaattcaatttgaatttggtctgaagctatcttgtatgaaatgttagctttcctgatatttaataatatttattatgtttgcatataagctcaaaaaattaatgcaaaagtatactttactcatggttatcttcaggtaaatattagtggttatgtttaaaagcctgattttatatagatgaagttgagaaaaaaaaagagtatggaaaggtaaattaggtcttagtcttgattctgttaccagctgtttgaccttgg

SEQ ID NO: 37416 - DNA, 369 bp, Homo sapiens
  misc_feature (1)...(369): n = A,T,C or G
gtctctctcatctgtatctctctctgtctctgtcgtctccctgtctctctatctctttgacctcttcctcttgtctttctctctgcctctctcatctgtgtctctctctgtctctgtctctgtcatctccctgtctctgtctctctctctctgtgtcctcctcctctcgtctctttctctctgcctctttcatctgtgtctctgtgtctctctgtcatctccctgtctatctctgtgtcctctcggtacccgatcgccgtggattgctcctggaccctgccgcctgctccaaactccaccagccccgtgtccttcattgccacgtacaggctcggcatggctgcccggngccacagctggccctgcctg

SEQ ID NO: 37417 - DNA, 372 bp, Homo sapiens
gtgagccgagatcgtgccactgcactctagcctgggccacagagcgagactccgtctcaaaacaaaacaaaacaaaaaactatctaattgtgagacttttctgcaattctgacaatggggatagcagaggagcatatttgccccatcttatcattaagttgtcaaaatctacccaggatgagaaatagaaaatagaggcctcattcattccttccagctgctgtggagtatcccagcaggtaacgactctacagtatttctctttcccctgtggataaatactcaagttgttcctaggcgttcactacaacgaacaatattgacaggagcatcctggatgtgtagctttcggcccatgtacaggtggttctt

SEQ ID NO: 37418 - DNA, 375 bp, Homo sapiens
  misc_feature (1)...(375): n = A,T,C or G
ttttttatagatggggcctcaatctatcacccaagctgatgtgcaggggcataatcatagctcactgctgtctcaaactgctgggctcaagcaatcctcccgcctcggcctctagaatagctgggactacaggcacacaccaccacacccggctaatttttttacaatttggtatagacaggggtctcactatgttgcccagggctgatctcaaactactggtctcaagcaattctctcgcctcggcttcccaaagngctggggttacaggcatgagtcaccacacatggtcagagacaggtactcttattgtccccatttcccagatgaagaaactgagacccagagagatgaagtgactgtcgagcggccgca

SEQ ID NO: 37419 - DNA, 382 bp, Homo sapiens
aaacagacacatacacaaagtagatttgttacgcagtttacaagcatgttcccatcacacagcaagaccaggacaggtgattcagggtagcagataagggaagacaccaaaacacaggaattgaaaaggcaagacccccgtccacaaggggaggcgagggaatgagagtatggatgaaccactctctgcagccaaaacagaacgaagcggggagcaagagagaggaaagcccctctcggtgcaggctgccggcctctcccacttctgcgaggagttggaagaagttattgccattgatgtgtgtcacacaggcagacaacagagggaggaagcaaggggtgccggcgaccattggcttcccagaacggaattccgcggactg

SEQ ID NO: 37420 - DNA, 361 bp, Homo sapiens
ccggctcaaactggagctggagcagcagggcttcatccacaccaaaggctgcgtgggccagtttgagaagtggctgcaggacaacctgattgtggtggcgggagtcttcatgggcatcgccctcctccagatctttggcatctgcctggcccagaacctcgtgagtgacatcaaggcagtgaaagccaactggagcaaatggaatgatgactttgaaaaccactggcttacgcccaccatttccgaggtcctgtccacggcggggcctcagcagaactctctgactggggcccctggcccggccccacccagccgacatgttttctttggcctgggtggtttataccctgagccaaccttt

SEQ ID NO: 37421 - DNA, 372 bp, Homo sapiens
cgcggccgcgtcgacggtgacaatgatgacatcctctgcaatgcaagacatctccttgatggtcaagtagcacatccgacggagtgtgggatcattggactgaaagagcttggtcatggcaaagaaggcctcggtcgcttccgtggtccccaggtgctccccctggtttatgagataaagaatcttggtgaggatgtgggcacatttccgagggttgatgggagtttcattaaatacacgggcctcctggagtaccgcactcttctcaaggtgctggaatgggttggagcctccacctgactcctcatccttcttgtcgaatttcttcaacatagtggagtcggtggggcgcaatgcagcaacgcaatgctt

SEQ ID NO: 37422 - DNA, 361 bp, Homo sapiens
  misc_feature (1)...(361): n = A,T,C or G
tgactgcactgatatatattttttttaaagagcaactgccacatgcgggatttcatttctgctttttactagtgcagcgatgtcaccagggtgttgtggtggacagggaagcccctgctgtcatggccccacatggggtaaggggggttgggggtgggggagagggananagcgaacacccacgctggtttctgtgcagtgttaggaaaaccaatcaggttattgcattgacttcactcccaagagatggatgcaaactgcccttcagtgagagcaacagaagctcttcacgttgagtttgcgaaatctttttgtctttgaactctagtactgtttataggtcatgactatggacaactcg

SEQ ID NO: 37423 - DNA, 368 bp, Homo sapiens
  misc_feature (1)...(368): n = A,T,C or G
attatcttggccttcataaaacttgtttgttcgatctgttctgttaacatctttttcgataagacttctataatctcttaacctcgaatttcttttctcttgttcctggctgatggatttccactgcagtttcattctgaagtattcatcagttttttgcttttgtaattgggttctttcctccttggtactgtcccagggaaaataaccccgaagaaatatccatgcttgctttctcaatgcattacgtaagccccctctaaatatcatctgcttcatattatctacatttaaaattcttccttcagaatcaatgttcttagtccattcttccagtgataccggntctctcctttgaacaacagggg

SEQ ID NO: 37424 - DNA, 300 bp, Homo sapiens
  misc_feature (1)...(300): n = A,T,C or G
caaaaatattaaaaatttanctgggcatggtggcatgtgcctgtaatcccaactactagggacagtgaggcagaaggatggcctgagcccaagagtttgaagctgcagtgagctatgatcagctgcaatccaccctgggtaacacagcaagactctatctcaaaaaaaagaaaaaaaagaaatacatagagttcagtccctagaagtatcttcacaatgatccatacagccttgctatgctttagaactttcaattttaggacaggaaagtaacattaaatgtagaagtcgacgcggccg

SEQ ID NO: 37425 - DNA, 300 bp, Homo sapiens
caaaaatattaaaaatttagctgggcatggtggcatgtgcctgtaatcccaactactagggacagtgaggcagaaggatggcctgagcccaagagtttgaagctgcagtgagctatgatcagctgcaatccaccctgggtaacacagcaagactctatctcaaaaaaaagaaaaaaaagaaatacatagagttcagtccctagaagtatcttcacaatgatccatacagccttgctatgctttagaactttcaattttaggacaggaaagtaacattaaatgtagaagtcgacgcggccg

SEQ ID NO: 37426 - DNA, 374 bp, Homo sapiens
ccagcatggctgtctctgcagtcgagggcaaggactctgcgtgcattctccactgccgtctactcggccactccggtcccgacacctagcctgccggaaagaacacccggaaatgaaaggccaccaagaagaaaggcactacctcctaggacagagaaaatggctgttgaccaggactggcctagtgtttacccagttgcagcaccatttaaaccctctgcagtacctcttcctgttcgaatgggttatccagtaaaaaagggcgtgcccatggcaaaggagggaaatctagaacttttaaagattcccaattttctgcatttgactcctgtagcaattaaaaagcactgtgaagcccttaaagatttttgcac

SEQ ID NO: 37427 - DNA, 399 bp, Homo sapiens
ggtagacataaatgatttagttaccttttattgagtactgccaaccacagagataaacactttacacattatctctgatattctgagaaagttgtttttacctgttttgcagataaggaaactgagacacagaatagtaactggcctaagggtacatagctagtacaaatcagagctagattcagatctgggtcttcctgactccaaagacaagactcttcattctatcaccctgtctcacaaaagacttgcccaaggctacgaagcaaggcagtgactagagtccagacatcagaactagttccatgttttttttttcactaccagtccctaggccccaaaccgcagatcctgctgtgtgaccattaagcccctgactgttctaggctcaacttccaa

SEQ ID NO: 37428 - DNA, 371 bp, Homo sapiens
cgaacagactactgtggacccagcctgtagtctggtgagcctataaagcccccaggagactgggacccgaagaacttcacagcccacttaccgaatgcagagagcagctttcctggctttgttcacttgcagaaaaggagcgcatggcataggctctgaagcactttacttgcacatttggagagaggcattgccttttatataggatctaggagtgattttattgttgtggagaaaggaagggcccccatggccctggctttgtcatcagtgactgccatatcaacagcagctctgtacctcatctgttgatcccacctttgaagaggagacacagcgctcagcttaattgcgctgagagcagcttatat

SEQ ID NO: 37429 - DNA, 391 bp, Homo sapiens
cgcgtgcctgtagtcccagctactcgggaggctgaggctggaggatcgcttgagtccaggagttctgggctgtagtgcgctatgccgatcgggtgtccgcactaagttcggcatcaatatggtgacctcccgggagcgggggaccaccaggttgccatctcaaaaaaaaaaaaaaaaggaaggattttaccctgagccctcaagaggtaaagtggatctgcccactttaagggtttctctccatcgggctttggccctttgttttaagcggcttctaatcctttgggccctgtaaaccaaatcttaccgggtttatttaaccaaaattactcttctttcggacataaacggttttcaccattttcatcaccttcggttttaagcctttacc

SEQ ID NO: 37430 - DNA, 360 bp, Homo sapiens
cccaagataggcttcccctggagtgaaagagatgttcctgatttcactccaggggaagcctatcttgggagttagtctgtcattctgctcatagatgttgagacccagggcatccacccccagccacagctctgagcctttcttgttcttgatgctgaagtagttcacaccatacatctccagatcttgagcaatcttcagatattccaggacagcatcctccctgagcatgccacggtgttcctcatgccacacctggatccgctcctcccactggtccttgttgagtttgtgctgttccaggactctctgcgggagcaacttgtctccggccaggtagccagacttatgcacttcctt

SEQ ID NO: 37431 - DNA, 391 bp, Homo sapiens
gtgggggccccatcaatccggccacagctgctgcctacccacctgccccctttatgcacattctgaccccccatcagcagccgcattctcagatccttcaccatcacctgcagcaggatggccaggacatcctcaatttcgtcgatgaccagcttggtgaataagtattactgtaccaactgggcctcctctagcaggcccctgaaggcagtggaataaaatgaattcttcgccctttaagaactcctgaccttaatgtggtagtagtatcttgtccttgaggggatttccttcccctcacccctaagactttcacaacctggtgactggaaagaaccaccacaaatcttcatttcctccagaaactgctacatctacagccgatttcagg

SEQ ID NO: 37432 - DNA, 385 bp, Homo sapiens
ctaaaggcaacgacaatgcttattgaagctgattttgcaacaaatcccatctgggaggtacaaacccaaatgactgagcatctttttatcccccaatcgctacaaaacctaaataactctaaacgggatgggagggcatattttaggtcagatgacatcctggataatatatcctatgtcctgtctcattccctagaccgcataacacttcaaccgtgtaaatctcaggaccctgaataatacagtggtacgggagaggaggggagctagcttgcaacctactccacacttgactcccatacgacaacagtaagtgtaacggcatttgcaaaatcaagtgcaaagtacctctaggctggagaagtatgatattctagccatacag

SEQ ID NO: 37433 - DNA, 378 bp, Homo sapiens
  misc_feature (1)...(378): n = A,T,C or G
ctaaagtcaacgacaaggcttattgaggctgagtttgcaacagatccgatctgggaggtagaaacaaaaatgactgaacatctttttatcccccaatcgttacaaagcctaaataactctaaacgggatgggagggcaaattttaggtcagttgacatcctggagaagatatcctaggtcctgtctcattccctagaccgcataacactccaaccgtgtaaatctcaggaccctgaagaagacagtggtaggggagaggaggggagctagcttccaacctactccacacttgactcccataggacaacagtaagtgtaagggcatttgcaaaatcaagtggaaagtacctctaggctggagaagtaggatattctacn

SEQ ID NO: 37434 - DNA, 385 bp, Homo sapiens
ggagtctcacaccgtcacccaggctggagtgcagtggcgagaccccgacccactgcaacctccgcctcctgggtctgagaaattctcctgcctcagcctcccaaatagctggaaccacagatgcccgcccccacgcctggccaatttttgcatgttcagcagagaaggggtttcgccatgttgaccaggctggtctcgtactcccgaccccaggtgatccacccgccttggcctcccaaagtgctgggattacagggatgagccaccgcgctcgaccagtattttctaaatttctttgttgatctttaaacattgctgctagaagaataaattggtgcctctctggaatgcaacatggcagcagtgagtaaaagccaccaaaatg

SEQ ID NO: 37435 - DNA, 371 bp, Homo sapiens
acttgctgaaaaaattaattgtggcttagtcaggcatttcgttgagtacgatggaccttactttggaactcagaaatcactttctcctgtgaaaatatcaaacttgaatgaacttttggaataaaatactttgtaaaatggagattttgggtatagatataaatagatctaagcctatggagttaataaaaaacaaaacactctaaaaaatgtaatatatgaagtcaaacgaaatctgagtcttttagatagtctatggacacgtaccttaactgaagaccaaaactgtcgttgaaaaaacaagtaaggcccagaatttttattttctaagacactaagtaaaaaaaaagagaaacatatcatgatcagaa

SEQ ID NO: 37436 - DNA, 365 bp, Homo sapiens
ctttgtgtccaggaattccccagacagtggggaaggaggagaggccatttctctcctaggtctggagtgtttcacctcggcatacgtcactgcctgggggtcttcatcgtgtgggctccgagtgtccatctccaccccatcctcaggctgtgtgtgcttcacggcagcatagaggttttcttcctgggcatcggcagctgggctggacctccactgcaggcctctgtctgtgggctctggccccacagcccctgcaggatgttggaaatcagcctttctctgggtcgatgtccagtgtttgccctgacgtcgatgtcggaggatgaggaataggaggaggaggaggaggagcactacgatgacgg

SEQ ID NO: 37437 - DNA, 378 bp, Homo sapiens
  misc_feature (1)...(378): n = A,T,C or G
ttttattataaaaggtacacttctgtttatatttaaacaacaaagaaaaaagcatctacacacttaaaaaattaattcaatattcctaaatctattttaactcattttaaaatactacatacagaagccagaatgcagagttaagaatggaataaggtggggagaagaaggggaccacgaagaaaaacacttagacaattacttgtctgttgtgggtaaagcaacaggaatcctgggagatacaagaaatcagtaacaactttgctcataactgatattttcccctcatgtttgtttttaataacgtccatatgggtgctctctgtatgctcccttcactggcctagcaagaggggccttcagcgacggcctggtccn

SEQ ID NO: 37438 - DNA, 384 bp, Homo sapiens
  misc_feature (1)...(384): n = A,T,C or G
gccgccgccgccttgctgctgctcaaagctgctgccgccccttgggctaaaaggttttcaaatggaacattttgatgcatcacttagtacctatttcaaggcattgctaggccctcgagatactagagtaaaaggatggtttcttctggacaattatatacccacatttatctgctctgtcatatatttactaattgtatggctgggaccaaaatacatgaggaataaacagccattctcttgccgggggattttagtggtgtataaccttggactcacactgctgtctctgtatatgttctgtgagttagtaacaggagtatgggaaggcaaatacaacttcttctgtcagggcacacgcaccgcaggagaatcagatatgan

SEQ ID NO: 37439 - DNA, 385 bp, Homo sapiens
cgcggccgcgtcgactcggggcgatggctctcctcacagcgtggccctcagcagcagaggcaggtcatcttcctgagcgtttgtggcgctcctcttaaagataatgtccgagttttctttacatacctgtagctgtttttacttttctgtttttgaagtcagtttgtgtcttgacgtgtcccttgcaatatccctatcgttatatatgctgtgtgccttatgaaatgctgggatctggaaaatccaaccaaccaacccaccggctcctcaccgtctccacctctgcctttgactgacacctcaatctgtcaatcggaaccgcctaccatgcgattggtcggatggcgtttcggggggcggtgcatgcagagaagccaacagagca

SEQ ID NO: 37440 - DNA, 389 bp, Homo sapiens
  misc_feature (1)...(389): n = A,T,C or G
cgcgggccgactggtgtttatccgtcactcgccgaggttccttgggtcatggtgccagcctgactgagaagaggacgctcccgggagacgaatgaggaaccacctcctcctactgttcaagtacaggggcctggtccgcaaagggaagaaaagcaaaagacgaaaatggctaaattcgtgatccgcccagccactgccgccgactgcagtgacatactgcggctgatcaaggagctggctaaatatgaatacatggaagaacaagtaatcttaactgaaaaaggtaattcaacagtggcgggacggnggacaagcgttcggtgcctgtcaccttcgccaaggccattaccgcccctgctcccccttcttgcagatctgctagaagatgg

SEQ ID NO: 37441 - DNA, 378 bp, Homo sapiens
aaagaatcaacaggatctaattaaaatcatggaggattttagcactagaagaggcacaaggaagagacagggatatgaactacaataagtttttttcctttgttgtatgagtgaatgttggatattgatatcaattccagagattgatagaaaaataaatgtgcttattatatgtttaattatatgctaattatatgtacaaattaggataaataacacaaaaacatataagtataatacaacaaataaaaatttgatcgtcaatttctgcctttacaataaaaggcagaaaagaagggggaatttttcaataaaaagtaacaagcaaaatattaagtccaataagtcagcattcacaaaaaatgtatacaggctaaa

SEQ ID NO: 37442 - DNA, 376 bp, Homo sapiens
  misc_feature (1)...(376): n = A,T,C or G
tttattacagaaatgaaaacagagctacagcctcatcctgcaattcacctttcccccagaggccaagaaagagattaacagaacaagaattacatgatgtatcagaaaaactctctcagcggctttctgaactagattggatgttaaaaagtgctctgggtgatcggattaaagaaaagactgaccataaagaagaaaatactggaaatgaggaggtagaggatggaactgaggagacactgtctcagcacagtgatggcatcgtggagtatgggccaaagaagtcaaggccaggactttccatgcgtagaaagccaccctacagatcccattcgctctctccatctccagttaacaaacacaaacagttccactn

SEQ ID NO: 37443 - DNA, 375 bp, Homo sapiens
gccctaccttcatcaacatgtctcaggagaatggcatgaacctgggaggcggagcttgcagtgagccgagattgcgccactgcactgcagcccgggtgacaaagcgagactccgtctcaaaaaaaaaaaaaaaaaaaaaaaagggggggggggaaccccataaacccccccctttaaaaaaaaaaacggagggaaagtgcccttcgggcattttggtttttaaaaagggggggaaaccggggattggaaaaaccccccctggtttttccaggggtttctttttgggggttatagccaaaggtttatccccctgaataaaaaaaaaccttttaggcccaaaaatttttttgtttctttattcccctccctccctcg

SEQ ID NO: 37444 - DNA, 372 bp, Homo sapiens
agaaaacacaaactctgcagggccaacataaggaactgcatatgatggtaaatgctggtaatagcacaggctgtgggatgtagtgtcatacagtgggcaatcctaaaaaagagaggctcaggccaggcgcagtggctcacacctgtaatcccagcaccttgggaggccaaggcaggtggatcattacctaaggtcaggagttcgagaccagcctggccaatgtggggaaactccatatctactaaaaatacaaaaattagctgggcttggtggcacatgcctgtaatcccagctactcgggaggctgaagcaggagaatcacttgaacctgggaggcagaggttgcagtgggccgagatcacgccattgcac

SEQ ID NO: 37445 - DNA, 390 bp, Homo sapiens
  misc_feature (1)...(390): n = A,T,C or G
ctagaccaggcctctccccaaaggccccaggtcagcagtgtggtaagcagggatctaaaggcagggcgtcctgcggtctgggccacgtgtgtgggaggacgctgccttttcctcagactctcctttcagggagtgtgcgggtccctgctctggtttgagagggaaccaactactcctctggtctgtgcggcacctcctgtcttggggcccatacccctagagtgccctgggcatggggacccgcacccactttgaacctggtatttctggccaggtccgtgggccacatccacaggcgagtcactgaccacctgggtgtcgtctactatgtgggagacactttctccgaagagtacacaggctccagcctcanaacagtcgagcggaatg

SEQ ID NO: 37446 - DNA, 372 bp, Homo sapiens
ccttgtctttgaccagatgaaagccgtcccgaggtttgtggtcaatgcctccaatcggcgcatggcagtcaatgcagatgctctgttccatcggcctgccacactctcccacggagcaaggatggccgttgggacaagtgtaccagtggactcgctccagacccttccacctccgagcttgagccagcaagtcttcaggcatggttggaagaaaagcatgcgccatggtggctggggagaaggccagattctttaggggctccaagagttcattctgtccacacagaaggacggctgcagcatgaatggccatttctgtcaccgttccatcaaggttgctgtcactaggccccgccctcaacaatggcacag

SEQ ID NO: 37447 - DNA, 360 bp, Homo sapiens
gccgggtggcatgtgcatccttgctcatctctttggtgtccatgatggtgaggacctgtgtctgtttcattcgccagcccctgccacagaactggcacattctaggattcagtgaacacttggtgaaggagtgagtgaatggaagtgcctgttgcgtgtaggacctagtagccagcctaaatgagaagatttaaccttgaggttattttagtacaatagggaagaccatcagtattcttggccatggaaataattcagggggaaaaaaagaaggttctgaagtgtataggaaaaggtataaattcaatacaagttgggaaattagcacctagataagactagagggtctggccctcagtt

SEQ ID NO: 37448 - DNA, 390 bp, Homo sapiens
gatgagtaggggaagggagcctactagggtgtagaataggaagtatgtgcctgcgttcaggcgttctggctggttgcctcatcgggtgatgatagccaaggtggggataagtgtggtttcctcttccccatcagtatctgtgtcctcagattcatcctcctgctccgagtctgtcccggacagcttcttgtccttgcttttcgttcccatcccaccgttcttccggccgccgctgcctggcttccggcccctgcgggcgcccttgtccccatccatgtggttgtcttccctttaaatcaaagcttaagaggtgtgttgcgtggtactatctgctgcaaatttatctgaagtttgttaatattttccaagatttttgtcagccttttcatt

SEQ ID NO: 37449 - DNA, 389 bp, Homo sapiens
gttgactgtgaatcccacgggccttctgacgctgcccctggggccacaggtccctcaagtgctggaatgatgaaggattcctgcatcactgagatggccatggcgctgctgactgggttctttttcttcgcgccggcctccagctacaacctggacgtgcggggcgcgcggagcttatccccaccgggcgccgagaggcactttggataccgttgcctgcaggtcgcaaacggggtcatcgtgggagctccaagggaggggaacagcacaggaagcctctatcagtgccagtcgggcacaggacactgcctgccagtcaccctgagaggttccaactatacctccaagtacttgggaatgaccttggcaacagaccccacagatggaag

SEQ ID NO: 37450 - DNA, 372 bp, Homo sapiens
  misc_feature (1)...(372): n = A,T,C or G
aattcccaaatgcctctcttcctgaacaccagaagtggtgggcacctgagtgggaaatttcaggcaacttaatttagttcctcagtgcctactcttgaagaactgggttttcattctagagaggaaactcagggaagggcgtgttgcctatcacaggttcgcatactaagttttaaaaacttttcttggtgtgacttatgccaaggaattatgaagactttttccttgagcattgcatgaaggctacaaagttggaacaggcatgtcctgggtgtgaaagttttaatttccctacctcatttatttatttaatttagagatgggggtctcactatgttgcccatcccggcttccaactcctgggctcaagcn

SEQ ID NO: 37451 - DNA, 375 bp, Homo sapiens
atttatttgcagctcatcttaagtgacaaaattccatacagaagactataacagaaatcatatttaatatattaaaattaatacttcaaatatctttcacattaagatgattatctattgtggaaatctttcctaggtatgtgtgtctgtttcttgatgtgtaaaccaaaactctgaaatattctcttgatctaactttgacttttaaaaactgacattgtattgaatttacataattctcaatcagaaaaaaaattactgtcagactgcaatgcaagtctgccccaatgaaggcaggaggagggatggctggaagtgtctcagggcactctgaaagtttagcaagcttatcaaggagtcctcaaactaaagctg

SEQ ID NO: 37452 - DNA, 372 bp, Homo sapiens
ttacagttgctttccagggatacagagacaggagaaacaaggtcagaacatatggatggatggctcttcagatacaaaggtgacttggattcaggttatttattttttctttttttgagacagggtcttgctctgtcacccaggctacagtgcaggggtgccatcatggctcactgcagcctcaacctcctcagctcaagtaatcctcccaccccagcctcctgagtagctgggaccacaggtgtgcaccaccaagatcttttcactttttgtagaggtggggtttcgccatgttgcccaggctggtcttgaactcctgggctcaagcagtccttccgctttggcctcccaaagtgctgggattcagtctgt

SEQ ID NO: 37453 - DNA, 378 bp, Homo sapiens
ttttgagatcttactgcttgtcacttgaatcccgggattgtcatacatctctggtataagcaacatttgatttttgaagggggtagaccatctcttcatattttcaagatggaatgatacatttctgcatttttaaaacagtttggccataattctagatgcacgcttctaattcatgtacctgcacatgtgacctttgtgaacagaaatttgcatgcataaacatgtggacacttgtaactttctgggtatatacagcttatatctgtggattccagttactgaagtgaataccaataaaaagaaaaccctaggccatgctaattggtgatacatggctggaatgtaaaaaaagaaaaagaaaggcactctgccctg

SEQ ID NO: 37454 - DNA, 143 bp, Homo sapiens
cgccacgcagttttatccggtaaagcgaatgattagaggtcttggggccgaaacgatctcaacctattctcaaactttaaatgggtaagaagcccggctcgctggcgtggagccgggcgtggaatgcgaggtcgacgcggccg

SEQ ID NO: 37455 - DNA, 380 bp, Homo sapiens
gcacgatcatgactcactgcagccttcatctcccgggctcaaggaatactcccaccccggcctcccaagtatttggtactacaggcgtatgccaccacacccagataattttttgtagagatggaagcttgctatgtttcccaggctggtcttgaactgctgagctcaagtgatcctcctgccttggcctcccaaagatttgggaccacaggcatgagccactgtacaggccagttactactattacatccctcatggtgtcgctgtggagacaaaatgagttgtgcttaggacaatgctggccctcggtaggcgctgctgtcatcaccatcactacttttagcctatcactgaccagtggggtgactgctgtttgttca

SEQ ID NO: 37456 - DNA, 384 bp, Homo sapiens
ggcacgttctattgggatgggcgaagttaatacagtagacaaataccagtgaatcgtgcccataaatcattgatgatctttaattgctgcctgtacggtgcaataataccagtatcagagggtgtgcctccagccttaccaaatatggaggttacgaaaactatgagtatgggttctgttacattgctcacaccacctttttcaactatgttctggcgctggaaccttgtctgcattaaggaaacaaacaggattgttgggttcaaatactcccatcaaccaaggattatcataataggccgtgtattattccaggtccagcttcacatctttaaagtgacgttggtttatcactgcattggccactgtgtttgagcacactcc

SEQ ID NO: 37457 - DNA, 372 bp, Homo sapiens
  misc_feature (1)...(372): n = A,T,C or G
tcctcattcacaaaattataaatgcagtttggggtggcactaaagcacgaggggaagagtttaatccaaactagagcaattacatcttcaaaccaatttctgaatagggctgctgtttttatcctttcatttttcttcttgagacttagagctcccttgaattatcaggagaatcacagctggtaatgtactgcaagttcttgaagctacacaatataggatggctaagttacatgtggtttccatattagcttctttgtaagggtgactttgctgcaaaacagattcatttgccccaccagacaaccccctgggagatataaattcctccatatgcatcactatagaagaagcctccatagtcacctccan

SEQ ID NO: 37458 - DNA, 384 bp, Homo sapiens
  misc_feature (1)...(384): n = A,T,C or G
gtgaaaccccctgtctactaaaaatacaaaaaattagccaggcgtggtggcgggagcctgtagtcccagctacttgggaggctgaggcaggagaatggcgtgaacccgggaggcagagcttgcagtgagccaagattgtgccactgcactccagcctgggcaacagagcgagactacatctcaaaaacaacaacaacaacaaaaagtctcgttctgagcattccagtagcttctttagtgtatgtagttagttgtaccataagtagttggtttgtgtgagatggttaaaaaggccaaagataaaatgtttcatttatttgccttttttgtctatgaaatggctgcttatttatttaggcctatttgatgtatgtgtgaaacaan

SEQ ID NO: 37459 - DNA, 380 bp, Homo sapiens
  misc_feature (1)...(380): n = A,T,C or G
ctggttcagagtttgtgccacccagtgcttctgcctcaggctcctgttcaccctctgctgcctctatagaatcgttctccaagctctcaggcagcaatgggcttggccgggggctgctgggccccaccagcccctctggctcatcactggccccagctgcagcactcagtgagtccatgcttttggctggccgcagtgtccccttgttggatttatcctccctgtcctcagccccccgtggaagtttacgcttagtctcatggccagagcgacctaaattgaagatagacctccacttcctgaccttcaaagaccccttcctcttgtgctctgcaatctcgatgatagtatggtagggccgcatctgtgggggtccatcn

SEQ ID NO: 37460 - DNA, 389 bp, Homo sapiens
gtggtgcccagttccgcataacaaagggccccaaagacggagaagaggcccccgacagcccagatgaccagagagagaccaaaggaggcactgtatatgagcacacccttgggggaaacaaagatgcctgagccgatcatgttccccacaatcaggcacacgccgttaagcagtgagatctccttcttcagcttcacctgctccggccctgggctggccccatcacccaaaggggaggtttccacctcaggctgggaggccacttcatactcagtgctgtcaaccatggtggaggagaggaaacccttcaccagcttcctggcattgcctccttggtcctggatataagcaggttctcacggcagtgtgagcggcagtcagggagagaa

SEQ ID NO: 37461 - DNA, 364 bp, Homo sapiens
tttgtcttttttcctcatacctactgcaaatgaaaaagtaattctaacatttaagggagccaagatgagacataaaactgagtttaggaaatttacaataaaagggaagattttcgctgaattagatagtggttgtgatattatataaagaaaaaaatggctgaggacaaatgtagaaaagaattgatcagtgatcgtgcatttcactaaagcgttctattgctttagtgaagcatactcagtatcttcagtatcagtagaaaagatactcagtatcttttcagtttgggatatgatggtcactgatggccatcagcattcattgcccagtgtgtgaggccactatggatgagagttgactatt

SEQ ID NO: 37462 - DNA, 365 bp, Homo sapiens
  misc_feature (1)...(365): n = A,T,C or G
agcctacaagcaggatgatgacctggacaaggtgctggccctactggctgccctgaccactgcgaagcctgagaacatccccctgctgcagaggttcagcatgttcgtgcatccataccacaagcagcacttcttgccgacatgcacagacctggccagccagcccaacccaggcatggagccgccaggaccccaagaggagagccttgccacgcctcctatgctcacccacggggcttcccaaccagaccgttcatggtgcaagaagcctgggaagacccagagcaagatctcatcattcctcaaacagaggccagcaggggccttgggggaggatggtgcggctgcagggcgaagccagtccn

SEQ ID NO: 37463 - DNA, 382 bp, Homo sapiens
gtggtgcccagttccgcataacaaagggccccaaagacggagaagaggcccccgacagcccagatgaccagagagagaccaaaggaggcactgtatatgagcacacccttgggggaaacaaagatgcctgagccgatcatgttccccacaatcaggcacacgccgttaagcagtgagatctccttcttcagcttcacctgctccggccctgggctggccccatcacccaaaggggaggtttccacctcaggctgggaggccacttcatactcagtgctgtcaaccatggtggaggagaggaaacccttcaccagcttcctggcattgcctccttggtcctggatataagcaggttctcacggcagtgtgagcggcagtcagg

SEQ ID NO: 37464 - DNA, 379 bp, Homo sapiens
  misc_feature (1)...(379): n = A,T,C or G
atttatcacaattatctcatcaataattaccctatttatcttatttcaactaaaagtctcatcacaaacattcccactggcaccttcaccaaaatcactaacaaccataaaagtaaaaaccccttgagaattaaaatgaacgaaaatctatttgcctcattcattaccccaacaataataggattcccaatcgttgtagccatcattatatttccttcaatcctattcccatcctcaaaacgcctaatcaacaaccgtctccattctttccaacactgactagttaaacttattatcaaacaaataatgctaatccacaccaaaaggacgaacatgaaccctaataattgtttccctaatcatatttattggatcaacn

SEQ ID NO: 37465 - DNA, 384 bp, Homo sapiens
  misc_feature (1)...(384): n = A,T,C or G
ttttttttttcgagatggagtctcgctctatcgccaggctgaagtgcagttgcgcaatctcagctcactgcaagctccgcctcccgggttcacgccattctcctgcctcagcctcctgagtagctaggactacaggtgcccgccaccacgcccggctaatttttgtatttttagtaaagacagggtttcaccatgctggccagggggatctcgatctcttgacctcgtgatccacccgcctcagcctcccaaaatgctgggattacagacgtgagccacggtgccgggcctgcagagaactgtctttcaaaacattctagtgaccacatagtacagtctcacacagggaggctccgtggcctccaccaccagccagcaacgtna

SEQ ID NO: 37466 - DNA, 377 bp, Homo sapiens
ttttttttttcgagatggagtctcgctctatcgccaggctgaagtgcagttgcgcaatctcagctcactgcaagctccgcctcccgggttcacgccattctcctgcctcagcctcctgagtagctaggactacaggggcccgccaccacgcccggctaatttttgtatttttagtagagacagggtttcaccatgctggccagggggatctcgatctcttgacctcgtgatccacccgcctcagcctcccaaaatgctgggattacagacgtgagccacggtgccgggcctgcagagaactgtctttcaaaacattctagtgaccacatagtacagtctcacacagggaggctccgtggcctccaccaccagccagc

SEQ ID NO: 37467 - DNA, 380 bp, Homo sapiens
gtcaacgcggccgcgcttgtttataaacctaggggggcggttctccactggctacaaacatccagctttgactgtctgacccagccccctttccagcctccagtcctaccacggcacctgacaccggctacatcaaactcctggagcaaccagaactcacggccctttttcacttccctctgtttggaacatccttcctctacctttagaattcactgtctctcttcctgcaagactcagctcaaatgtcccctcctccaggaaacatcattttccccactggctatccacaggacattatcatggctcctggggtttccatgtctctatgccagcttcacagagagcccttgatggtatggattctgatccccccaagg

SEQ ID NO: 37468 - DNA, 398 bp, Homo sapiens
  misc_feature (1)...(398): n = A,T,C or G
cgggaactggtgaagagtggggttctgggagccgatggtgtttgtatgacgtttatgaagcagattgcaggtgagtttgatggcaggagcataaagaagaaaggaggagagcccagagactacatagagacaatggagaatgattaagtgccaaagggatggaattcttggattgcttagactgtttccttctgatacagacatcttctggccacatatgttgtagaaataaattgattgaaaaatcatggggggccttttaaagcagtaagtcttgcctcattttctttcctgctaaacccagggcttgacagaatatttggcctattttagccagtcttcactctgagattntatagcatttcagagcaggaagaaatggggagagaagtgagggg

SEQ ID NO: 37469 - DNA, 320 bp, Homo sapiens
gttgggtggtagcagcaagagaatcactgtcttggtaacaaacaagagaaattgtgagtttctaatttattccctcttgagcctattttcagaaaaatgaaatcaaatgggcttcatggctttttcttgacttctttaccttcttttgacatggctggtcatgggacttcacacccgcaagactgtttctccccctctttctttctcatagccattttaatttaagtgatgatatgtatgttcacatttgtctggggacagtcctagtttttgctcattgtcccggagggattatatgtaagtttccgtcgacgcggccg

SEQ ID NO: 37470 - DNA, 389 bp, Homo sapiens
ttttcattcaagataaaagatttattcacaccacaaaaagataatcacaacaaaatatacactaacttaaaaaacaaaagattatagggacataaaatgttatattctctttttaagtgggtaaaagtattttgtttgcgtgtacataaatttctattcatgagagaataacaaatattaaaatacagcgatagtttgcatttcttctatagaatgaacatagacataaccctgaagcttttagtttacagggagttttcatgaagacacaaactaaactaattatcaaacacatcaggtatttccagactcaaatagatacacattcaaccaataaactgagaaagaagcatttcatgttctctttcattctgctataaagcattttg

SEQ ID NO: 37471 - DNA, 379 bp, Homo sapiens
  misc_feature (1)...(379): n = A,T,C or G
gccagagactggcgggcagctccgcccgcggccgggatgcactaggcaaagccagctgggctcctgagtccggtgggtacttggagaacttactgcgtctagctggaggattgtaaatgcaccaatcagcatgctgtgtctagctcaagaactcaagctccatgaggagatgtttcattgtcgagagcagtcatgatggcctgcactccacacaatgcaacagagtgaaagagcaggttctgcttctttggtgtagtcctgaagcttcctaagaaacttcacatcaggtgatggataggagcaaccctgtaaaaccagccttagactatttttcaaacaggctggtgaattaccagatctccgtcaagtgcagtaaccn

SEQ ID NO: 37472 - DNA, 386 bp, Homo sapiens
gggagctgcttatgggacaccgcttcctgcgcggcctcttaacgctgctgctgccgccgccacccctgtatacccggcaccgcatgctcggtccagagtccgtcccgcccccaaaacgatcccgcagcaaactcatggcaccgccccgaatcgggacgcacaatggcaccttccactgcgacgaggcactggcatgcgcactgcttcgcctcctgccggagtaccgggatgcagagattgtgcggacccgggatcccgaaaaactcgcttcctgtgacatcgtggtggacgtggggggcgagtacgaccctcggagacaccgatatgaccatcaccagaggtctttcacagagaccatgagctccctgtcccctgggaagccgtgg

SEQ ID NO: 37473 - DNA, 348 bp, Homo sapiens
ttggtcactgatgattccattctttaaggcagacggcattcctcttagtgtggagctgtagcttttctatacagaagagattttattatgttccggggattccctttttagaaagattgaaggatgcagtggcaaatataaactcaatactatgaaaaattaatggaatttcagcctcaaagaacattttcctcccttcctttgtgtccttattctaatcctcctcccctggaattacacttttttatgtgttgactctacctaggctgttactatcagcctgaatgggggcgggatgagagtacctcctatccactaatttgcttaaggataagttctaagacggcg

SEQ ID NO: 37474 - DNA, 369 bp, Homo sapiens
  misc_feature (1)...(369): n = A,T,C or G
gcatgatctcggctcactgcaacctctgcctcccacgttcaagtaattctcctgcctcagcctcctgagtagctgggattacaggcatgtgccaccatgcccagctaatttttttagttttactagagatggggtttcaccatgttggccaggctggactcgaactcctgacctcaggtgatccacctgccttggcttcccaatgtgctgggattagccaccacacctggcccagtggataattctaaagcacttctatttacataaatggctttgtcagtagctatcatccatataaattatgaactacttcttcgccagaaagggtggggncnnncnnnnncnnnnnnannnncnnnnanannannn

SEQ ID NO: 37475 - DNA, 371 bp, Homo sapiens
aaaggaaaaaagagccataaatacaaatgaattccttttatacgagttgaaaaaccacaggacatgctccattttttaacactccaggtgtgatcggagattacgtatccaccacaggagagtggagagttaattaaaatttttgctcctactcagagaaagaaatgtctttttgtttgataagcaggctggcttttgagtgttgttggtgctttcttctctcctcactggagtggcacaaaaaagcagatcaaagagagccttccatccggatatgtttcctaccacctttcttagctaatggacttaaaagtgtctttcactgacaggctcatcttgtattttagaaatgccatctctttactatattg

SEQ ID NO: 37476 - DNA, 376 bp, Homo sapiens
cacgccgggttcccactcaccttccatgagctctccgcagctcaccggccatcacttgaagcaaacactcctgagggagctggctgaggaaaggcagacatccggcttcttgccctggaacaactggcagacaagggtaaggagctgggactgatcttccaagggttgcccattgacggtgacccaaggcacatactcgtgcggaggctggagagcatctgtccgctgggcgttggcgtgcatgatctgcatgccgcggtcccccattgcacactccatgatagtgtctggcgacagccctgcggcgtagagctgcaagcatagagggagacttctctgcatgtcctcaaactcttgcatgcagacaatggacagg

SEQ ID NO: 37477 - DNA, 388 bp, Homo sapiens
cagagtctcactatgttgcccaggctggtcttgaactcctgaactcagtcattggccaggctggtcttgaactcctgagctcaggcgatccacccaccttgacctcccaaagtgctgggattacatgcatgagccactgtgcccagcccaaagcagtcttaaaaaggaacaacaaagttggtagtcaaactttctgatttcaaatcttatttcaaagctatagtaattaaaacagtgaggaactgcataaatacaaaccatatagatcaatggaacagaatacagaatccagaaataaaccctcacatatatggtcaaatgattttcaagaaacgtgccaagaacaaacaatggaaaaaggacggtcttcacaagaaaagatgatggg

SEQ ID NO: 37478 - DNA, 373 bp, Homo sapiens
ctgaaaccaccagccttgaagggtacaagtgacgaggaagattctgttttgggtatagccagagaaaacaaggatggagaaaaatctaggacagtgtcttctgagaaaccaccaggcttgaaggctacaagtgatgagaaagattctgttttgaatatagccagaggaaaaaaggatggagaaaaaactaggacagtgtcttctcagaaaccaccaaccttgaaggctacaagtgatgaggaagattctgttttgagtatagccagagaaaacaaggatggagaaaaatctaggacagtgtcttctgagaaaccatcaggcttgaaggctacaagtgccgagaaagattctgttttgaatatagccagaggaa

SEQ ID NO: 37479 - DNA, 385 bp, Homo sapiens
ttgctcttccgtgcagcaacaagaatgacttaactgttaccttagacactgcacaaacatctggaagcataaacagtgtaaaaaaatgtgcagccagactctgggcttgtcatttcagaccactctcaagtctcaagaaaagttaactgtccctttcagggacacagtgggtccccactaggacacacccaacaccttcttcctggagtgaatctggcagaggtttctttgagcaccagactgtctagaagatatgtatttgggctgttaatgctcacagtgggtcaggaattaggatactgtcaaatggcagcacacaaccaactgttcctctgctctagccccagctggggtaatatctctgtcaaacttgctgtccttcagg

SEQ ID NO: 37480 - DNA, 363 bp, Homo sapiens
atcccaacaggctgagactgggtcttctgagctgagagctttctctcctggaattccccactggggataaagagagcctgagggtaaaatgacttagtctttccctgggcacactttgtttcaggctgaggtagttttatcgggtggaggggcagggaaaaacccaattaggtggagagctactaaagcttcagatttatatttctgtttaggaacattttaaaattatgcctgggtagatgcttctagcctaatgtaaaggctagaaaggacaccatctgtctatgtgagcatgcgagtatctgtgtgtgcatgcctagctttaatgagcataaataggccgcacgtgactcttcatgagat

SEQ ID NO: 37481 - DNA, 353 bp, Homo sapiens
  misc_feature (1)...(353): n = A,T,C or G
ccttaactggaggtgacttcttccgtggctgagacttctgtctctcctgggccctctgagggatcttcctccggcctctctggtggcgctggacccagccactcaactcgtcagcaagcctcagggactcagtgcggttgaagtgccggcaatcanaggagaggaagagctggtctaggtctcttagtagtagctccttggcgcccccagggaaggctgtcaggttgctgaaactgggctggtctgtggggctgggctggggctccttatggccctgggaggacccctggagaggttcaactccctgaactggctcttgctctgagaaccccagcaagtggtcgacgcggccc

SEQ ID NO: 37482 - DNA, 386 bp, Homo sapiens
caattataaacatttattaagcaccaagaatatactgtggtggttgctatatgaaaacataattaccaatatagtatccctgccattgagcttacaatctaaaacgaaatacaaggctatgagcctatctaaaaacttccttaacttaaaaatggctactttggcaaatgagtgaggcaaaatgacctattattcaggtgcagtgctaataaggctttgaatatcatccaaagaatgttttacttgtacccattgttcctgattatgttacacttgctaagaaaaacagtacttagaattttggcatgaacaatgaattatttcaaattgtcttgtaggactttaaacaaagagatgcttactggcctaagttttccagcagccag

SEQ ID NO: 37483 - DNA, 377 bp, Homo sapiens
tagaggttatccacagggaggatgggacttgcattgcactaaagggaaaggatggatgccaaagcacgagagtttgcaggtttcaagggagggctgtcagacagcatccatttaatagcttgaagcaagagactggtcatttgctgagatttggggctgtgggaaggacctacggtttgagacattctgaaatgctgaccacaaagcccactgttgggggaagacgggtttagtgggaagggcaaattgagagacgaggtccaccaagcagctctcagcagtttgaaggcttcaagttggtattgatgcatatcatggaacaaaagaataacactgattaaccatgtgtgccatttatattctaattcagaacgctt

SEQ ID NO: 37484 - DNA, 390 bp, Homo sapiens
  misc_feature (1)...(390): n = A,T,C or G
ggccagttgggatgaggcacacaccatatccaaattcccttggtgtgagactgcaccgtagatgcaacagagaagcctgtcagggggagtgagaggttgtaatagaagagaaactctggaaattggggatttgcttgatcattcagctagagtttaaggaaagcaagatgaggagatagcagaatgtacaaccagtattgatttgaatgatgatgcagaaatggaaaaacaatatcaaataccataggttggaactttgatattaaaaaaatattatgctactaaaatgttgctagtttataattatgtatacgggaattacttcattgatgtcttactccttacaaggagaatatattatacattntacaagaagaaatcaaggcaaag

SEQ ID NO: 37485 - DNA, 356 bp, Homo sapiens
gctgcagtgagctgagatcctgccactgcactccagcctcagtgacagaggaaaactctgtctcaaaaaagaaaaaaataaagcactcagaaatgtaggaatagaaatgaactttcttaacacaataaagggaattttaaaaaaagaaaatatagattccagattatataagtgtgatataaaaaaactgatgcaacaaaaacaaaaatggacaaatgagatagcatcaaactaaaaagcttctccacagtaaaggaaacaattaacaaagtgaacagacaaacccacagagtgggagaaaatatttgcaagccatacatctgatatgggattaatatccaaaatatgtaaggaac

SEQ ID NO: 37486 - DNA, 376 bp, Homo sapiens
  misc_feature (1)...(376): n = A,T,C or G
cttggatgagcctcttctcaagcactgggggatggaccaacactcaatctcctttatttcaaggtttcctcctatgatgcttgtgtgaaacttggtgttctaactgtttcataatatctgctacaattaatataactgtcttctcctactatccagcttccgcctttttttaatctgtaattctctcaatacatcattctgtcttcctcttctttaatctatgaataacttttctctttattaagaaccctacatttgattctgagggttacttcttcccacactcattaccatgtactctgccttatttccccccagagtttgatgctccaagccctctcccagagactacagagaacgtggtgtgtgccctggn

SEQ ID NO: 37487 - DNA, 376 bp, Homo sapiens
ccgagatggcgccattgcactccaggctgggcaacaaaagcaaaactccttctctaaaaaaaaggagacaggacctggggtcacccagctggtgaccaaaaacctcgagttggtctgcaagacagatcctgactccatctccaaaaaaaaaaaaccggggaaacagtctctttattattgttggaggaagggggctgaatccaaaaaccggaaccagggagggggttaaaaaaaaaaaaacccttttttcttgaaaaaaccccccaaggttttgttttttttcctggcagtttgggacaaaataacacaggcatttcccatgcccaccacccgtaaggaaggtccattcctgggctgggggcgcaggtccagaacc

SEQ ID NO: 37488 - DNA, 370 bp, Homo sapiens
  misc_feature (1)...(370): n = A,T,C or G
ttataaattaagttttatcataggtatgtatgtatagaaaaaaatagtatatatagggtttggcactacctgttgtttcagtcatcaactggggttcttggaacagatctccttcagataaggggagtctagtgtaccccaaaattagtggttatcagcaaaattgattgtttctcatggcactgtgcattgaatgagcagttctcatgcttcacatgctgccagttgagccactggaatggctagaagcggaatgccttcacatggttagcaagtcggtgccagcgctgatactggctgttgcctaagagttcagctaagactgttaaccagagtctcgattctcctccacatggctaggttgggcttn

SEQ ID NO: 37489 - DNA, 373 bp, Homo sapiens
tttttttttacttggtcctttttatttggcggtggatccaggacaagggcaggggggaatccaagcaggggcttccctagcttcatatcccccaggcccctgcgtctctggaaggtaccaccaaggggcaggggtttcagggggctcaccctcttcatggggcaggcctcagtcctgggtttgtcacagtctggccttgaatttgcctttggccttgaccttccgacaggtgctaggaattgttccgacttcaaagggcagaggcaacaaggcacttccagctgggggcctcggaggcacaggagagcaggagcctttcttggcttcaggatgctgggtgccaccttgaaatcaaggttcggtgggagggaaa

SEQ ID NO: 37490 - DNA, 352 bp, Homo sapiens
aagaatctgagcactctaattcccacccataatgagagggtataccatttccttaaaaaaatttttttttcacttttttttccaagacgggggtctcactatgttgcccaggctggtcttgaactcctgacttcaggtgaaccgcctaccttggtctcccagagtgctgggattgcaggtgtaagccactgcatctggcctcagagagcataatctgtattccctagcagctggttttactattggttttcttatagacttcaaagatgtattgggctttgaaaaccttttggctcctaggaagaagctatttctgcttggtggagtcctgtctgaaagtgaattctctgtt

SEQ ID NO: 37491 - DNA, 384 bp, Homo sapiens
  misc_feature (1)...(384): n = A,T,C or G
ctggaacaccaatccagaacaacgttttggagctgtggtcattatttgatttcctcatgccaggatttttgggtactgaacgccagtttgctgctcgatatggtaaacctatattagcaagtagggatgctcgaagctccagtcgagagcaagaagcaggtgttcttgctatggatgcgctgcaccgccaagtactaccgtttcttttgagaagaatgaaagaagatgttttgcaggatcttccacctaaaattattcaagactattattgtactcttagtcctctccaggttcagctctatgaagattttgctaagtctcgtgccaagtgtgatgttgatgaaacagtttcttcagctacactttctgaagaaactgaaaaan

SEQ ID NO: 37492 - DNA, 384 bp, Homo sapiens
tctccctcactctatggtccccttcattcatagtttcaacagtctgcacagcatgtcccataattccggtcacagacatgctgccatcttcaaggaagttcacaaggacaatactgggcaacatggcgaagccccgtctccacaaaaaatacaaaaattagccagacgtggtggcaaatgcctgtagtcccagctactcgggaggctaaggcaggagaatcgcttgaacctgcgaggtggaggttacaaagagccgagatctcgccactgcattccagcctgggtgacagtagaaccttggcagagactgggtctgtagttaaaacccatcctttatactcattcttctcactggctgtcactcggacctctttgtaaatgtaa

SEQ ID NO: 37493 - DNA, 373 bp, Homo sapiens
agaatacagacaactcagaggacagtcgagctgaagacaattttaacttggaaaaggaaaaagaagatgtccctgtggaaatgtccaatggtgaaccaggttgccactactttgagcagctccattacaatgacatgtggctgaaggttggcgactgtgtcttcatcaagtcccatggcctggtgcgtcctcgtgtgggcagaattgaaaaagtatgggttcgagatggagctgcatatttttatggccccatcttcattcaccctgaagaaacagagcatgagcccacaaaaatgttctacaaaaaagaagtatttctgagtaatctggaagaaacctgccccatgacatgtattctcggtaggtatttgtg

SEQ ID NO: 37494 - DNA, 182 bp, Homo sapiens
cccgcatacaatgagagccaaatatgaccagtccttctgtgtcttttactctccccttcactacacacaacctaaacccactgtgcctgactggacgcggaggctcacgcctgtaatcccaacactttggaggccaaggcgggcggatcacctgaggtcaggaattcaagtcgacgcggccg

SEQ ID NO: 37495 - DNA, 389 bp, Homo sapiens
gcttattaccacctgcttgagctggtggctccaaaaggagatgaagaaagtgttactgctgttgttattgacatgtcaggactgcgggacaaggatgacatccagagggcctaatgcatgctgcaacacgcggataggctgggctgctcggcattttgtcacagccacagatgttgtccgagggaaccccaagctgaacttggcttttattgtcaacctctttaacagataccctgccctgcacaaaccagagaaccaggacattgactggggggctcttgaaggtgagacgagagaagagcggacatttaggaactggatgaactccctgggtgttaaccctcgagtcaatcatttgtacagtgacttatcacatgccctggtcatct

SEQ ID NO: 37496 - DNA, 373 bp, Homo sapiens
gcgcagtgacgccgacccatccaacggtcatcgcatgcgcgtgccccgcgcaggccccaaacccccacggattaggttgaaggtcagacaaaaaatcccggacccatacgtccggttccttaaggccttgcccacacgcagcggctggccccgcggtgggagtggggacggggctttcgaatgggggccccgggaagagtcttggcagggatgaggaaagaacccgttctagaaagcatctgggtaacaccaaaatgtattactaccctaaatcgccatgaactggagccctttcccggctaactcccacaaagatttctgttctcaagccaacatggaaacaactagacgggacacagcaccgggcagtttt

SEQ ID NO: 37497 - DNA, 377 bp, Homo sapiens
ctccgggatcttcagcacccgcggccgccatcgccgtcgcttggcttcttctggactcatctgcgccacttgtccgcttcacactccgccgccatcatggtgaagctcgcgaaggcaggtaaaaatcaaggtgaccccaagaaaatggctcctcctccaaaggaggtagaacaagatagtgaagatgaggaaatgtcagaagatgaagaagatgatagcagtggagaagaggtcgtcatacctcagaagaaaggcaagaaggctgctgcaacctcagcaaagaaggtggtcgtttccccaacaaaaaaggttgcagttgccacaccagccaagaaagcagctgtcactccaggcaaaaaggcagcagcaacacctgc

SEQ ID NO: 37498 - DNA, 377 bp, Homo sapiens
catggcattcctttggcttgtgtcctgctttgcccttgtgggcgccacctttggctgtggggtccctgccatccaacccgtgctgaccggtctgtccaggatcgtcaacggagaggatgctatccctggctcctggccctggcaggtgtccctgcaggacagaactggcttccatttctgcgggggctccctcatcatcgaaaactgggtggtcactgctgcccactgcggggtcaagacaaccgatgtggtggtagctggagagtttgatcagggctccgatgaagagaatgtccaggtcctgaaaatcgctcaggtttttaagaaccccaagttcaactccttcaccgtgcgtaatgacatcaccctgctgaagt

SEQ ID NO: 37499 - DNA, 398 bp, Homo sapiens
ggcaaccctagtctgctagccaggatccacaagtccttgttccactgtgccttggtttctcctttatttctaagtggaaaaagtattagccaccatcttacctcacagtgatgttgtgaggacatgtggaagcactttaagttttttcatcataacataaattattttcaagtgtaacttattaacctatttattatttatgtatttatttaagcatcaaatatttgtgcaagaatttggaaaaatagaagatgaatcattgattgaatagttataaagatgttatagtaaatttattttattttagatattaaatgatgttttattagataaatttcaatcagggtttttagattaaacaaacaaacaattgggtacccagttaaattttcatttca

SEQ ID NO: 37500 - DNA, 357 bp, Homo sapiens
cacaaggggaaaccagtgaagaccgggagccctacgttcgtcagagagctccggagtaggacttttgacagctcagatgaagtgattctgaagcccactggaaatcaactgaccgtggaattcctggaagaaaatagcttcagtgtgcccatcctggtcctgaagaaggatgggttgggcatgacgctgccctcgccatcattcactgtgagggatgttgaacactatgttggttctgacaaagagattgatgtgattgatgtgacccgccaggctgactgcaagatgaagcttggcgattttgtgaaatactattacagcgggaagagggagaaagtcctcaatgtcattagtttg

SEQ ID NO: 37501 - DNA, 375 bp, Homo sapiens
caaatttcttgggtatgatagctgtattgtggggatgcaaaggaatgtcttttttcttaagggacacatggagaagaattaaggaaatccagttgtttgcattttaactttcaaatggtacagaagaaaatgaatatgcatacatatgtacattatgtagtgaagaatacatgattgttcaaaagttttttacacagagtattttttaagttggaagaaaaataacagtgtttctcaccaccagtggcatcttagatttgataaaaatataacatggctttgaaatcagtaaatatatactattccttgcttgttacttacagatgatggaggtagtacatttgcctcagtagattttacgattggagatgaaaa

SEQ ID NO: 37502 - DNA, 378 bp, Homo sapiens
  misc_feature (1)...(378): n = A,T,C or G
accgcttcctcttcaccatcacaggcttctggctgcgcaggatggcgctggccctgcggatggctgccatgcgcaggtcggggcggtacttgttcttgcggatcatgtgtctgatgctgctgagcgtggcgcgagcattcttgttgatggtggtccgcacataggaggtggcaggcttccgctggccggatctccgcttaatgaccaccacgacacctttgccgtcggctgccggctccacgcccacagtcttgcggtgaatcagtccgttgtagcggaaggaattgcgggccttcaagttattgggctcagtgctgtaggtctgcttattcctcttgatcaggaaactggagcagttccgcacgaccatccattgcn

SEQ ID NO: 37503 - DNA, 373 bp, Homo sapiens
cccttttaaaccctatagggtaactttctgacgttgccttggcatttgtaaactgtcatggagggagtgtctgttagcatgttaacatatgcatattatatgctaattatatgcattataattagcatataataagcgtgaggatgaccagaggtcactttcgtcaccatcttggttttggtgggttttgtttggcttctttaccacaatctcttttatcagcagggtctttgtgacatcttgtgccaacctatctcatcctgtgactaagaatgcctaacctcctgagaatgcagcccagtaggtctcagccttatgttacccagcctctattcaagatggagttgctttggttcaaacacctctgacatca

SEQ ID NO: 37504 - DNA, 384 bp, Homo sapiens
  misc_feature (1)...(384): n = A,T,C or G
gaggtattcaactgatgtccctgggttcagtgctgtggctgggttcctccatcctaacacgggcatcttgctgggaggcaggaagcaggcagtagatggaccctagagcatcttgtgaatccctagcttcctgctttgggtctagaggattgattgcatattaagcctcaaactttcacaatatgttatttgtccattcatgcaattatgcattcagcaaacatttttttaacacttagtatgtattaggtatatggcaggtgcccaggagacaggtcaccctgccctcaggggcccacagtctaagtgggggacaatttantgtgacaggctgtcatggaagtgtgcctgggagctctgagaagggaggtggccaccacttgg

SEQ ID NO: 37505 - DNA, 350 bp, Homo sapiens
gcaaatttggtctggaagtcacattccttgctctgcaggtaatcatcagagacaaccaccaccatccggcggcacctaggggagagtgggcaggctgcaggtcctgtggcaacttagttcagcatatcccctgggaatagcttcaggaagggcccactgtgcccaggctggacagtgcacagctaggaggagatgcccagtatctggaccccagggcagggcttcatgcatccacgcacccaccccgtggccttctagccaacctcttttcgatgagctcactagcaatagaccagacacaggtgccaggcaggacatcgcggtcagacacacacaacttcagtcgatag

SEQ ID NO: 37506 - DNA, 357 bp, Homo sapiens
ctcgcagtcacgattgatcttgttttactgagattaagctgtgaagacttaaaatctccagtgttgatatttaaggcttttgaggattaattcttataatcatttttgatcgaataaaattaactcattatgtccccccatgtgccttttgggagacaaaaataattaacacaatcgaaaggatttataaatgtgtttgaagaaattccacttggggatgcggccctattgtaatttactgaaaacagcagagggcattgttaccagtggattgtgtgccctaagaaaactccatttgagatgactgtctgtcgaactgtgttctcaaatcattactgctcgctaatggttatctta

SEQ ID NO: 37507 - DNA, 386 bp, Homo sapiens
ctgttgagaggagtttggatcttgacataagtaaaaccaatgtgaatggaggagccattgctttgggtcacccactgggaggatctggatcaagaattactgcacacctggttcacgaattaaggcgtcgaggtggaaaatatgccgctggatcaacttgcattgtaggcggccaaggtattgctgtcatcattcaaagcacagcctgaagagaccaccgagctcactgtgacccatccttactctacttggccaggccacagtagaacaagtgaccttcagagcagctgccacaactggccatgccctgccattgaaacagtgattaagtgtgatcaagccatggtgacacaaaaatgcattgatcatgaatacgagcccatgct

SEQ ID NO: 37508 - DNA, 370 bp, Homo sapiens
  misc_feature (1)...(370): n = A,T,C or G
ccatgttggccaggatggtctcgatcatctgacctcatgatccgcccgcctcagcctcctaaagtgctgggattatgggcgtgagccaccgcccccagcctagaggcacaatttaacacaggtattgtcacctaagggcaggacaagggacaccaggctttggcaaccagcctcatgcagaccagacgaattccgagtgtgtggcttggtacttggatgtgtgacaatgtggtgagtgactgctgtttaggaagtcactgcctcaggaaaccctttctctgctaagctgcagattctctgcagagcagtgccacactacagaccagacctcagcgtgtctccttgttttgactttatatcacttttaaan

SEQ ID NO: 37509 - DNA, 362 bp, Homo sapiens
  misc_feature (1)...(362): n = A,T,C or G
gcgagagcttcaagagcaaagagtttgtgtctagtgatgagagctcttcgggagagaacaagagcaaaaagaagaggaggaggagcgaggactctgaagaagaagaactagccagtactccccccagctcagaggactcagcgtcaggatccgatgagtagaaacggaggaaggttctctttgcgcttgccttctcacaccccccgactccccacccatattttggtaccagtttctcctcatgaaatgcagtccctggattctgtgccatctgaacatgctctcctgttggtgtgtatgtcactagggcagtggggagacgtcttaactctgctgcttcccaaggatggctggttataatn

SEQ ID NO: 37510 - DNA, 349 bp, Homo sapiens
ctggtttcttgccttaaggagcccattgcctttcccgctgaagtctagatgttgacatgtaataaagcggtcagcaggatggtggtggatgcggccaactccaatgggcctttccagcccgtggtccttctccatattcgagttgaggctgtgaagctgggcagggtttcagctgagctgaggttggaagtccctgaccttcagctgtggccgcctacggagcagcagggagagcaaacccatggagaaccccgcggcccccaaagcatggacggagctgccagccttatcccctgcccttcttcctctactcccgacctgccagccttctcccctgcccttctgtctg

SEQ ID NO: 37511 - DNA, 111 bp, Homo sapiens
gcactataagtcggaaatttggaccaccaaggactatgtgactatcattgatgccccaggacacagagactttatcaaaaacatgattacagggacatctcatgctgactg

SEQ ID NO: 37512 - DNA, 359 bp, Homo sapiens
gttgagataggtgggcacttccatgtaggagctgcagagggtcacgatgctcaggcagaagtccagcagctgcagcgtcatcagggggaacttggaggagctagcacggctccgggaggccaacttgaggtaggcgggcagctcaatgtatgagcccaccagggtgagcaggcacaggagatagtccatgatttgcagggacaggaagggcagcaggtacttctcccgggtcttgactacgccgatcagtaggctcaggctgatgatgaagagcatggtgatgagcaggaagctggagatcacgtcagcgatcctgaggtagcccatctgggagagcttgcaggacgccttgccatggg

SEQ ID NO: 37513 - DNA, 385 bp, Homo sapiens
ccgccgcagccaccatatataaagcgcacgcactttcccttggagaggtcgaagtaccaacgaggcatcacggcccggcagggccccgtcatcgcctcctgggagcagacagctttgacatcatgagtaatttccttgtctgacatggtgccgtcgctgccgggttcagtaggattctcctcattgtagtcatctcctttgaaggtgtcatagtagtaatctcggtcctccaccacttcctccccttcttcctcatcctcatcatcctcatccacagctgcttctgtgaagtcttccagatctgcttcagtaggaaattcacttttataaacatcatagtcttcctcttcatcttcctcttcctcttcatcttcctcttcctctt

SEQ ID NO: 37514 - DNA, 392 bp, Homo sapiens
gcttcttcctcagggaacttgatgaccacatcagcctagaaaaataaggacagtctgtaaaagcacaggggcagagaagtgggtgaaactcaatagataatattctctgactcacatctaagaccataactgaaaaaagctccaggcagtcccaatcacttctgatccattagctgacaaattgaggcagtaaaaactttaagaacaaaacaagtatttgctgaaaatgctttttagagcaagacttctaattttctgctggtatagtagccccatagagctgcttaatacaaaaatcccagctggtacacaggctgttacagttgcaatcagaaacaagcttggtgtcccttgggaagtgtgatttagtcacatttgaaaaagagagaaag

SEQ ID NO: 37515 - DNA, 371 bp, Homo sapiens
tgagattgttctaaagggacaaagagaggtccaccgtttatatcagagagccttacagaagttacctctttgtgcatcactgtggaaagatcaactcttgtttgaagcatcagaaggaggtaaaactgataacctgagaaaactagtttccaagtgccaagagattggagtcagcctaaatgagctcttaaatttaaacagtaacaaaacagaaagcaagaatcactgaacactgggtgcagtcagttctaagtccttataataattgccaaaattatttgaatgattcttcaagattaggctgatccctggctaaggtctgtgtaaggcagacaagcgttattgatcatatcaagttccctacaatatcc

SEQ ID NO: 37516 - DNA, 388 bp, Homo sapiens
  misc_feature (1)...(388): n = A,T,C or G
cttgactggagaatgcactgacagcactgtcccagcttgagaacccaacggttgtgcagagggcatccgaccactatagccagcatatggcccagcaactgaggctcctcacagacacgctccaggagctgctggacgtgcatgcaacctgtgagagggaagccattgcaggcttcatggagcactccttcaaggatgaaaaccatgaattccagaagaagcttgtggacaccatatagaacaagaagggagactttgtgctgcagaatgaagaggcatctgccaaatattgccaggctgagcttaagcggctttcagagcacctgacagaaagcattttgagaggaattttctctgttcctggaggacacaatctctacttagaagn

SEQ ID NO: 37517 - DNA, 381 bp, Homo sapiens
cgcagacggggaagcggagccaacatgccagtggcccggagctgggtttgtcgcaaaacttatgtgaccccgcggagacccttcgagaaatctcgtctcgaccaagagctgaagctgatcggcgagtatgggctccggaacaaacgtgaggtctggagggtcaaatttaccctggccaagatccgcaaggccgcccgggaactgctgacgcttgatgagaaggacccacggcgtctgttcgaaggcaacgccctgctgcggcggctggtccgcattggggtgctggatgagggcaagatgaagctggattacatcctgggcctgaagatagaggatttcttagagagacgcctgcagacccaggtcttcaagctgggcttg

SEQ ID NO: 37518 - DNA, 374 bp, Homo sapiens
attggaagcaccaccctagcaatatcaaccattaaccttccctctacacttatcatcttcacaattctaattctactgactatcctagaaatcgctgtggccttaatccaagcttacgttttcacacttctagtaagcctctacctgcacgacaacgcttggtaaaaaacaaaaaacaaataccctgcacagagagaacccaagaaaaacctgggggctcccccccgcgcctgtctccggtcccaagagcggttgacctgggacccccgcggggggcactttccgggggccgggaccccaccctcgacatttttaatattaaaaacggttttccctttttttataacagtacccccccaggaggcgcgttgtgc

SEQ ID NO: 37519 - DNA, 381 bp, Homo sapiens
  misc_feature (1)...(381): n = A,T,C or G
gaaatgtttcccatcatagtggattcttaagcacgttctccacgtatgcggcgtgctagctggatgtcttttggcataattggtacacgtttggcatggatagcacacaggttggagtctttaaaaaggccaaccacataggcctcacttgcctcctgtggagcaccgatagctgcgctctggaagcgcatatctgttataaaggcctgagcaatttctcgcaccagacgctggaagggaagtttgcgaatcataagatcagtggacttctgataacgtctaatttcacggagcgccacagtacgcggcctgccacgatgaggtttcttcacccctacagaaaagggcgcactcttgcgagcggcttttgtggccaattgn

SEQ ID NO: 37520 - DNA, 377 bp, Homo sapiens
gcaaagggcagatgggtgaggctcggcccctgtctccagagagctgaagagggccctcggccccacccacgaggaggacagtcatgaggccgactgtggaggggctctggacagaggtgtccggggatccctgagcctggctgcactctccctcctggttctttccttgcgtgcacacgatcagctatcgtttacaaagagtccttggtgttgcctggttggctgcccaggatgggagctcctgcccccatcggacatgtaaacaaaccaaggtctgtccagttccagctgacagggcctgcacctccgccagggctaggcagaagtagcatcagagcacaggagacccgggaggaaccgagaaccagcgctgctct

SEQ ID NO: 37521 - DNA, 360 bp, Homo sapiens
cctgagttcccttcccttgctctgcacagcctgctcatcaccactgatggggaactctgtcctctgtagggcccctgcagacatgggccttgcctggatgctgctgctgtcggagcctaggagagttgtgcctggcatcgcagcacaggtactcacagctctcagaaggagactcctgtctgggaccctgccctcattcccacgtaggaaaaatcctttacatgagcatctcctggccttcattgttaggttgtagactacaatgaatgatattctgtgtttaattacattatgcacaacactctacagagtgggtggttttgaatcccaaccactaatttacgaagtggagcggctctg

SEQ ID NO: 37522 - DNA, 381 bp, Homo sapiens
cacggaataggcaaatagcatatggcttttaagcatgatgctaaaagaaattcagattttaacattaaggtagtattagtctatgctgagctcagtactaaagaaatataagcaaacatcttggcacctgaaacggaagcagtacatatttttaaagtagagactaatgtagagaagttttatttaaaaaaacagaacatttacaagacaccagttattatgggccccatatgtcattaaaaaagtttactttacccttattattatttccctaggctagtcaagcagcaaaccattaatcggtcggagaaaccttcatgacatatgcccgactggctcttcgccacccacttgaaggacactacccaatcgatggaagcc

SEQ ID NO: 37523 - DNA, 379 bp, Homo sapiens
attgatttatttttcttcaataaagttgcataaaccaatgagttagctgcctggattaatcagtatgggaaacaatcttttgtaaatgcaaagctgttttttgtatatactgttgggatttgcttcattgtttgacatcaaatgatgatgtaaagttcgaaagagtgaatattttgccatgttcagttaaagtgcacagtctgttacaggttgacacattgcttgacctgatttatgcagaattaataagctatttggatagtgtagctttaatgtgctgcacatgatactggcagccctagagttcatagatggacttttgggacccagcagttttgaaatgtgtttatggagtttaagaaatttattttccaggtgc

SEQ ID NO: 37524 - DNA, 376 bp, Homo sapiens
tcttattaccacctgcttgagcaggtggctccaaaaggagatgaagaaggtgttcctgctgttgttattgacatgtcacgactgcgggagaaggatgacatccagagggcagaatgcatgctgcatcaggcggagaggctgggctgccggcagtttgtcacagccacagatgttgtccgagggaaccccaagttgaacttggcttttattgccaacctctttaacagataccctgccctgcacaaaccagagaaccaggacattgactggggggctcttgctggtgagacgagagaagagcggacatttaggaactggatgaactccctgggggtaaccctcgagtcaatcatttgtacagggacttatcagatgc

SEQ ID NO: 37525 - DNA, 385 bp, Homo sapiens
  misc_feature (1)...(385): n = A,T,C or G
aagaaatcctaaaatttatatggaatcagaaaagaccctacaccatcttgagcaaaaagaacaaaactagaagcatcacactaccaaattccaaaatattacaaagctatagtaatctaaacagcatcataatgacataaaaatagactcattaaccaatggaatagaaaagagagcccagaaataaacccacgcaattcaaatcaattgatttttgacaaagctgccaagaacacacggtggggactggacagtcttcaataaatggtgttgggaaaactggatatcgacatgcagaagaaggaagatgaacctttatcttacccttatacgtaatacctttataccttatacctttanaccttatacctttataccttatacc

SEQ ID NO: 37526 - DNA, 379 bp, Homo sapiens
  misc_feature (1)...(379): n = A,T,C or G
aatttctagaggtgagtttgaggcaagtttaaatggtagactgaagatagcagttgcaatgtgatgtgctttactggtttgcaatttgaatgtctctggttatttcattaaacattctggtaaactctctgagtgacccagatagcagcaggcattaagattggcattaaggcataagtgctctgttgcagcgatttttctgaagcttaaagtcaccagtttcagtttgcatagctttggaaaagggcagttttagtttctagtggaactaaaaaacaaaaattcaggagtcaatctggtttatagggagataataaaacttcaaagaaaatgaacaggcctagaatttgacaatggatgcacaatagttttctactan

SEQ ID NO: 37527 - DNA, 377 bp, Homo sapiens
cacgtctttatttttataaaggacatttctgacaaatagaacaatgtagtgatcaaattattctttctattggtatgcttttgctgcttatgtcaaataatatgtattggagattctatacagaaagattatatacaatagaatacctcacataatcgtgaaaatatatggaaatatatattactttattataactccctgaacttttatgaatattaaagggtcccataatgaaatcttgtatcttttgtgaaatcactataaaaattatattatattggtcagtaaatctttatatattggctgatgtcatagaattccttaaagaatttagtgataggaaaatagtttggctcctaatgagtcagtaagctttc

SEQ ID NO: 37528 - DNA, 144 bp, Homo sapiens
tgatgtctccgggcttccagaggacaaagggtggcgggaaagggggcgaagaggtaggaacgtcgagactctaggaaacatcgccgagacacgaaatgaaccaagaacacaactgaaatggtgcgtcccgcgtcgacgcggccg

SEQ ID NO: 37529 - DNA, 371 bp, Homo sapiens
ttttgagatcttactgcttgtcacttgaatcccgtgattgtcatacatctctggtataagcaacatttgatttttgaagtgtgtagaccatctcttcatattttcaagatgtaattttacatttctgcatttttaaaacagtttggccataatcctagatgcacgcttctaattcatgtacctgcacatgtgacctttgtgaacagaaatttgcatgtataatttgtgtttacttgtaactttctggttatatactgcttatatctgtggattcaagttactgaagtgaataccaataaaaagaaaaccctaggccatgttaattggttatacatgtttggaatgttaaaaaaaaaaaaaaaaagtcgacg

SEQ ID NO: 37530 - DNA, 351 bp, Homo sapiens
aatcaatcaaatgcagttccatatttacgccaagcgtgactgctaaagacagcaaataaaggcatctacttaaatatgtctacttttaaaagcctattttacacttattgaatatacttgccaaacttttgtaaccactacacattccttttcaaatcctactttattctagaatttaaaaagattttcattgcacttttttttttatcaaaacgaaaacacatattgaatgtactgaaataactttcagtaaaaattataaagctttagccgggcacagtggctcacgcctgtaatcccagcactttgggaggccgaggcaggtggatcacctgaggtcaggagtttgag

SEQ ID NO: 37531 - DNA, 363 bp, Homo sapiens
cgggctttcatttccatttcacacaccctagcaacacttataccttgcggaattgtattggtagcgtgaaaaaagcacactgagagggcaccatgccggtggaaaggatgcgcatgcgcccgtggctggaggagcagataaactccaacacgatcccggggctcaagtggcttaacaaggaaaagaagatttttcagatcccctggatgcatgcggctagacatgggtgggatgtggaaaaagatgcaccactctttagaaactgggcaatccatacaggaaagcatcaaccaggagtagataaacctgatcccaaaacatggaaggcgaatttcagatgcgccatgaattccttgcctgata

SEQ ID NO: 37532 - DNA, 367 bp, Homo sapiens
  misc_feature (1)...(367): n = A,T,C or G
cgcggccgcgtcgacgccagtctagctgctgcacaggctggctggctggctgctaagggctgctccacgcttttgccggaggacagagactgacatggaacaggggaagggcctggctgtcctcatcctggctatcattcttcttcaaggtactttggcccagtcaatcaaaggaaaccacttggttaaggtgtatgactatcaagaagatggttcggtacttctgacttgtgatgcagaagccaaaaatatcacatggtttaaagatgggaagatgatcggcttcctaactgaagataaaaaaaaatggaatctgggaagtaatgccaaggaccctcgagggatgtatcagtgtaaaggatcacan

SEQ ID NO: 37533 - DNA, 338 bp, Homo sapiens
gcctcagcttctctcccaacactcagcttttctcccaatacaggaacttttggaggtcacttctggggcctttgctgagcaggccactccttgcttctcctgcagatgacaaggtttccagcatgattattgctatgactgatggaacaatgatgaaacatccatctttggacactctcaaagaaaatcctaccatgtggttattcatggaaatggctttcagaatctaaagaaacgggatgaagttatttgcagatttatcttcagtgaaagcactatcattgggagtacttcattgaagtcagcttgaacaacggcgtcgaatcggacagcaatgt

SEQ ID NO: 37534 - DNA, 374 bp, Homo sapiens
tgactgctgattgtgacggtcacgttgcctaagactcatccttgaaaaactatgggctgctgcccagaaatcattatacccttggctcaatcctctaagctaacccacttctactgagcctttagtcttgaatttctaaaaaacagaggccatggcagaataatctttgggtaacttcaaaacggggcagccaaacccatgaggcaatgtcaggaacagaaggatgaatgaggtcccaggcagagaatcatacttagcaaagttttacctgtgcgttactaattggcctctttaagagttagtttctttgggattgctatgaatgataccctgaatttggcctgcactaatttgatgtttacaggtggacacac

SEQ ID NO: 37535 - DNA, 385 bp, Homo sapiens
  misc_feature (1)...(385): n = A,T,C or G
ggaaaggccagccccagacatgctatcgccacaatgccatgtcgcaataggaagcaggggccggccatcgctaccttcagcacactgaccaacctggaattaagaccacctagattgcgagagctgaatttagaaaccagacaacgtcatgcagcccagaaactcctgttgttacctttgcctaagaaattttctttaatggcgggggcggggggcgggggtccaaagagaaatctctaaaagaatatgatcttccatccaagtggagggaaactttaaaacaaaaacacccagtactgtggctcangatatgatgcgtgaggagagggagggaacagagatgaccttaacttttaaaaaagggactgctgtgggccaaagccan

SEQ ID NO: 37536 - DNA, 391 bp, Homo sapiens
  misc_feature (1)...(391): n = A,T,C or G
aaggcctagtttttcccagccaggccccgagtccgagagagggttaacaggcaggaagccgaaggcatcgcaggctaatacggaagatggctcttgctcacccgagcctcacaaagataatcgctcaggaagcctnnananacnctcggttttcttttcanccagcttgatcatcacctagagatttgcctatgcaataaaagcccacaatgcccaccaccaccacaggcttcgtaattgcagataggatcttcagagcttgtggattcaccaccagctgccctttagagttatcaatgaggctcattgggcccggcaagttgatctctgtagtcatgtacagggtgttgttccccaaatcatagatccctttgcactggaaagaacgttn

SEQ ID NO: 37537 - DNA, 365 bp, Homo sapiens
attttttagtagtgaggtcaggagttggagaccagcctggccaacatgctgaaaccctgtctgtacaaaaatacaaaaatagctgggcatggtggcgcatgcctgtagtcccagctactagagcgactgaggcaggagaattgcttgaacctgggaggcggaggttgcagggagccaagatggcgccaccgcactccagcctaggtgatagagtgagactccctctcaaaaacaaaacaaaacaaaaaaattagacaaatgctacattaatgtttgggtggtcagattctactttgaatctgaagtttgcagatatgcctatagatttttggagtttaccactttcttattctgtatcattaatg

SEQ ID NO: 37538 - DNA, 392 bp, Homo sapiens
  misc_feature (1)...(392): n = A,T,C or G
caagctgttctttatttcagggagagggcaggggaagagaaggtaaaggacatgccaacaacaggtgggaagcacgaatgcagatgacagcaagaggaaagaaggtgaagttagtaaccactctgaacagaaacaaaaaaagactcatcccaacagagtaaaagaggattactgattcctgggacatgcataggaaataggatctttattggctgtagaatcctaagggaatcccatccaaacatccaaactcctgcctctgctacattttaccaatatactgacaggagttacaccaatattggtcttcagacgcaaattccagtactatcctttacaaaaccagaacatagaacaaagtggtaaaccactgtgaagttatgaggccaaan

SEQ ID NO: 37539 - DNA, 354 bp, Homo sapiens
gggatgacatgggggagggaccactaaactagtgaaccaaattcaatgtggggtgaaaaaagtagtcaaaccaattcttactgaacagtcaggtaatagactaaaaaagtcatcacttttcaactagttttttttaagtatcccaccgactatttttagtttttcttttttaacccgacggcaaaattacaaaaccttattttccttgcctggcaattaatatctgaaaccaaaatattaactacctcaaagggtagtgtgaggatcaaatgcgataatgtccacagactgctaactaaattaagctccttcctttggtgcacatagagaacaacttccatggagaaaaacaag

SEQ ID NO: 37540 - DNA, 384 bp, Homo sapiens
  misc_feature (1)...(384): n = A,T,C or G
tacgggtgaagtggagggagagagggaggggagagggtatacagggaggagcagaggctgggaatagtgcagaaagttgacatctctcctttaaagatattctacagatcaactctgtctaagcccagccctgatttagtcaggagcttttcttcttctttctgctttgcggnctgagaagcattgcctgttaagcacataagtttaggtaacaaatgacttttagtaggagcctcagaaaggagataccatttaacaggagccgttgctttatagatgcaatggcttctatgacaagcagcctttggaagttctaggaccaatcggacaccctgactgatgaataaatgccacaaaggacttgccaagtgggagaaaatatgc

SEQ ID NO: 37541 - DNA, 366 bp, Homo sapiens
  misc_feature (1)...(366): n = A,T,C or G
tccaggtccccgaatacctgaccaccagagaacatctgtgccagaaaatcatgctcagtccaggattgcacttgccctgacagctatcagtcttggcaccgctcggcctcctccgtccatgtctgctgctggccttgctgcaagaatgtcccaggttccagccccggtgcctctcatgagtctcagaaccgcaccagcagccaaccttgccagcaggattcctgcagcctctgcggcagccatgaacctagccagcgccaggacaccttgcattccaacagcagtgaacctggctgactctcgaacgccagctgcagcagcggccatgaacttggccagccccagaacagcggtggcaccttcggn

SEQ ID NO: 37542 - DNA, 364 bp, Homo sapiens
  misc_feature (1)...(364): n = A,T,C or G
atataaccttcatttttaagactgtaatgtgtactggtcagcttgctcagatagatctgtgtttgtgggggcccttccttccatttttgatttagtgaatggcatttgctggttataacagcaaatgaaagactcttcactccaaaaagaaaagtgttttgttttttaattctctgttccttttgcaaacaattttaatgatggtgttaaagctgtacaccccaggacagtttatcctgtctgaggagtaagtgtacaattgatcttttttaattcagtacaacccataatcatgtaaatgctcattttctttaggacataaagagagccctagggtgctctgaatctgtacatgttcttgtcn

SEQ ID NO: 37543 - DNA, 379 bp, Homo sapiens
  misc_feature (1)...(379): n = A,T,C or G
ccctcgtattcattcatgtttgtgtcttacttattgaaaacagagaaaaggtttatttcctgattcaccttactaattatgctcagttacactgcacttgggccttctttcaggcccaggaattcaagctctttccagtctcagggactgtgtaaactgttctctctgcgtaaaacactctcctactttacctttgtctggctaatttctttcttttttttttctttaatttttcttttattataataatactttaagttttagggtacatgtgcacaatgtgcaggtttgttacatatgtatacatgtgccatgttggtgtgctgcacccattaactcatcatttaacattaggtatatctcctaatgctatccctcn

SEQ ID NO: 37544 - DNA, 394 bp, Homo sapiens
cctgattccaaaattggctctttgcttggagaaaattcaagaagaagattacacagcatggaagatgctaccactaggatttcatctggtgcattttgtaaaaccttcattaaaggtttccaaacagcatgatcctggaaactggttcgaagctgctgcacagatctggataaactgtgcaaacatctacaaagaataatcaaaattagcttcacaagaaatcaaaacttttacttttcaaacaaactggctggcattttacaatgactaatgtacacttcaagcatatctacattgttaagtgaactacatcagaccactttatggggtttggaggccaggctctctgttagacaatgttatatactctatgaattcacctgagcagattttt

SEQ ID NO: 37545 - DNA, 370 bp, Homo sapiens
aaattaattacaatctggttgttgagcctatgctaattaagccctcttagtagtagtattcactttacattgaagacctcattcacaaatacagggtgctctgtgcttatatccttccacccttgactgccaaaaatgtgtgaaatggaaagttgatggcagcagggccgacgatgtcacctggtgcctcgcgggctcagtgagttaggaagtcagcagcaggggaggcagcttgcatgcctgtcccccggcacactgtgtggaggtggaaacagagctacgccagcaggcgccaagcacccaactccagagatggaagcctggtggccttcctttcacagagctcagctgctcgcaggctgtgaaatct

SEQ ID NO: 37546 - DNA, 381 bp, Homo sapiens
  misc_feature (1)...(381): n = A,T,C or G
gtgaaaccccctgtctactaaaaatacaaaaaattanccaggcgtggtggcgggagcctgtagtcccagctacttgggaggctgaggcaggagaatggcgtgaacccgggaggcagagcttgcagtgagccaagattgtgccactgcactccagcctgggcaacagagcgagactacatctcaaaaacaacaacaacaacaaaaagtctcgttctgagcattccagtagcttctttagtgtatgtagttagttgtaccataagtagttggtttgtgtgagatggttaaaaaggccaaagataaaatgtttcatttatttgccttttttgtctatgaaatggctgcttatttatttaggcctatttgatgtatgtgtgaaan

SEQ ID NO: 37547 - DNA, 384 bp, Homo sapiens
ttgtgaagtcgtggcccgttagcaggaagcctaacagtcgccccgacgctagtgagggacccaatctgagtccccggccagccgaatccaagccgtgtgtactgcgtgctcagcactgcccgacagtcctagctaaacttcgccaactccgctgcctttgccgccaccatgcccaaaacgatcagtgtgcgtgtgaccaccatggatgcagagctggagtttgccatccagcccaacaccaccgggaagcagctatttgaccaggtggtgaaaactattggcttgagggaagtttggttctttggtctgcagtaccaggacactaaaggtttctccacctggctgaaactcaataagaaggtgactgcccaggatgtgcggaag

SEQ ID NO: 37548 - DNA, 376 bp, Homo sapiens
cggagagctgcgcagtcaatatgtgtgacttcaccgaagaccagaccgcagagttcaaggaggccttccagctgtttgaccgaacaggtgatggcaagatcctgtacagccagtgtggggatgtgatgagggccctgggccagaaccctaccaacgccgaggcgctcaagggcctggggaaccccaatagtgatgagatgaatgtgaaggtgctggactttgagcactttctgcccatgctgcagacagtggccaagaacaaggaccagggcacctatgaggattatgtcgaaggacttccgctgcttgacaaggaatgaaatggcaccgccatgggagctgaaatccggcatgttcttgtcacactgcgtgagaa

SEQ ID NO: 37549 - DNA, 371 bp, Homo sapiens
gggccaaggtattggaggactccctcccagctttggaagcctcatccgcgtgtgtgtgtgtgtgtatgtgtagacaagctctcgctctgtcacccaggctggagtgcagtggtgcaatcatggttcactgcagtcttgaccttttgggctcaagtgatcctcccacctcagcctcctgagtagctgggaccataggctcacaacaccacacctggcaaatttgatttttttttttttttaaaaaagggggtctcgcaactttgcccaaacttcttttgggttagtaaaaaaagctttctcaccggcaaaaaaaaaggccgccggggccggaattcccaaatttttaattggaaaatcctgaaaacccccgg

SEQ ID NO: 37550 - DNA, 375 bp, Homo sapiens
gcaggcgcctgtaatccccggtactctggaggctgagccaggagaatcgcttgaacccggaggcagaggttgcagtgatccaagatcgtaccactgcactccagcatggggaacagagcgataatctgtctgaaaaaaaaaaatggaataatacaaaattatactaagattcattcatgttattttttggggctgcagggcattcatttccactatatagtatttcattgtctgatgtaccagaatttatccactctctttttgatgcatgtttggatttgcagtcttttgctttatgaaaagtgctgctgtaaaaattattattatctgtctcctgatgcatatgtgaaagggtttttctaggagtgaaattgg

SEQ ID NO: 37551 - DNA, 258 bp, Homo sapiens
  misc_feature (1)...(258): n = A,T,C or G
ctgctgttttattgtggttgtggttcaagtttttaatgtttaaagttgatgctgttttcagaagagctttttactaatttatttgtcagtgttccctatttgttacttaaccatgatcctccagattttttggagtattcttttctaaccttaaccctgccaaaccttgatccattttgacattntgtatgcactatttttatatctctgtgagagatataaaaatagtgcataacaaatgtcaagtcgacgcggccg

SEQ ID NO: 37552 - DNA, 390 bp, Homo sapiens
  misc_feature (1)...(390): n = A,T,C or G
tcagttttggagggggacagaggagcttatggcccaaggtgaggggctgggcagtgggcacttagccccagaggcagaggaagcagaggctccaacctatgtcggtatccccactggagtgagctgcagacgggaccttgttcattctgccttctgccatggggatctgcctttgaagggcaatgggagaagtcctcctggggactgcagctgtcgggggcagtaccacatcgggggaagagtgctcaaggcaggagcttttcccgtcctgcctggccactggctgccttgtgagccggacaggtggtccactgtgatggttaatgtncccctccccacccactcccagctacaggggtttctgataccatctgcgagccctgcccagtt

SEQ ID NO: 37553 - DNA, 397 bp, Homo sapiens
gaagaacttggggagtgaaatggacatggagttccatgaccttgatgaattttccttgcttgcctcagtttcctttctctgaagacctgagttccctttcatcttggctgttgtgtgctccacctcagtgaggctggctccctggccctgtcctcccactccagcaagactctgctctcccaccccaacaagactgctgactcctccctcagcagaggggagactttgccttgaggagggttggttaaagtaggaaagtgccccagagtcatgggcgtgggcaggcactgaggtatttgtggctgtgtggcaggggtccagcgtccttggtgggtttgaaatagcaaagtgatatttgagagggctctccttggatgtgctgagctgaggttcctgc

SEQ ID NO: 37554 - DNA, 308 bp, Homo sapiens
attttttaaaatatttcaaaataagttgttgagctggcaagaaagtaaagtttcacaggggccataaaaaatgagaatgagactctcacaccagttagaatggcgatcattaaaaagtcaggaaacaatagatgctggagaggatgtggagaaataggaatgcttttacactgttggtgggagtgtaaattagttcaaccattgtggaagacagtgtggcgattcctcaaggatctagaaccagaaataccatttgacctagcaatcccattactgggattctactataaagacagtcgacgcggccg

SEQ ID NO: 37555 - DNA, 372 bp, Homo sapiens
  misc_feature (1)...(372): n = A,T,C or G
gtttctctaatcaagttgtaacactcgctgctgtggtccacagcttcattccttgaagcccgtgagacacgaacgcttccattgagaaaaaccttccatcagaagaagacttctcgtctcagtgggactgctgagttgaatggtgcttttttttctgaagctttggtagtgtaactgtaagagtcctggaattggaaaagcaaatccagaagttgagttccatgacttttttgctgtttgcctttggacttgcatcatttatatttttaattcatcgaggatgagaaaattgattaacacaaaatcttttcatgtcttttctgatgagagactagctgaatccaagaagagaagcccttngagagtgattct

SEQ ID NO: 37556 - DNA, 371 bp, Homo sapiens
gaaagatagtgaaaatacacctgttaaaggaggaactgtaacggatctaggtaagcacctaaaatctatacactggtctgagctttctggcttgaatatgtcatctcctttgatagtctattcttccaaggtcttgatctgttggacaggctggagtgcaatggtgtaatatatctcaccacagctttaaacttctgggctccagcgattttactaccttagtcttccaagtagttcggattataggcacacaccaccatgcccagcttgaaacactccttcttttcttttttttttaaaacggagtctcactctgtcccccaaagcttgcggtgagaccggatcacgccactgccctcacacctgggcgc

SEQ ID NO: 37557 - DNA, 355 bp, Homo sapiens
ttggtcactgatgattccattctttaaggcagacggcattcctcttagtgtggagctgtagcttttctatacagaagagattttattatgttccggggattccctttttagaaagattgaaggatgcaatggcaaatataaactcaatactatgaaaaattaatggaatttcagcctcaaagaacattttcctcccttcctttgtgtccttattctaatcctcctcccctggaattacacttttttatgtgttgactctacctaggctgttactatcagcctgaatgggggcgggatgagagacctcctatccactaatttgcttaaggataagttctaagacgggctagaaaaa

SEQ ID NO: 37558 - DNA, 364 bp, Homo sapiens
  misc_feature (1)...(364): n = A,T,C or G
ccggccaggacttttattagttttattatttagacagctttccagcacaaccttgcaaatagggaaatagtgagaaaatcatggtctttggaaccaggcaggaccagggtcaccctgactctgctcagctgttgtcattgaagggggtgtggagatactgaaacttccgtgaaccttagtttccttgtctgtaaaattaagaaaccttagtttccttgtctgtgaattaataactaaaaccaaaatattaactacctcaaagggtagggtgaggatcaaatgcgataatgtccacagattgctaactaaattaagctccttcctttgtggcacatagagaacaacttccagggagaaaaacaan

SEQ ID NO: 37559 - DNA, 395 bp, Homo sapiens
ccgtttcctctgggatctgagaagtcccaattctttcttccaactctgaatcccaggcttaactagacaatggcttttggatccttgtgccagcccttccacccccccatacacacataagtccagccaagcacccctcagaattcaagcccctcccctaagactcacaatcagaagggactgcctatgcctctgagccccaccccaaaaccaagcacggcctggaagaaagccatcctggagcatgcacacacacacacatacgcaagcacacacagccagacgtgcagaaacaggaatggttacacatacacggtcccggagcacagacctgcccgtggacacacagccagccagactcgcaaacaggtccttgcagctacacacaaaccatc

SEQ ID NO: 37560 - DNA, 388 bp, Homo sapiens
  misc_feature (1)...(388): n = A,T,C or G
tttttgtttaacatcgtttaataaaaaagtagtagtgcaaacaggaaagtagcataaaaatatagtgttgttgtggaaggctggtgcttgctgctgagaagctgaagccagaggaggccaggtgtgaggaaggaggattctttaaaggcaagaagagagaggcctgcctttaagagccaagagagccgctcatccatgaccccaacacagagctctgtagaactgctgtcacacgccaaacaccaacataagggggtgagagaatgaactccagccgcttctcccaacacaacccaacagagctattctgggacatgtgtgtttgcgagcttgtgtgtggagagcaccaaaaagctcatcagcagccccaggcctctgtgcggtctgn

SEQ ID NO: 37561 - DNA, 378 bp, Homo sapiens
  misc_feature (1)...(378): n = A,T,C or G
cccgatgcagtcaaagccaagttgatctctcggatggctaaaatgggccagcccatgctgcccatccttccaccacagctggattccaatgattcagaaatcgaagatgngntcctttctgctgacataagtatcgctgaattctgaacaacatgaagacatcccacagggtcagagacttttaccggaggaactagggtggttggggtttgcatttggcatcggtttgggtgggttcggaggccttgggtcgtcattttctccatcatcaacagcatctcctaagtcaatgtcatcccctacaagaggggaaagagcagntaatacccaattccctatacaaaccacgaaggaatgacctcgtgaacagatctaaaa

SEQ ID NO: 37562 - DNA, 386 bp, Homo sapiens
cgacaaaaataaaatccaagctaaatatatatttttgaaatgtacattttccattacatgaacatgggcattacactgcacaggcagtcaacagtaagcacacactcatctgaaatcacctcctctcagctgacataaatatcgctgaattctgaacaacatgaagacatcccacagggtcagagactcttaccggaggaactagggtggttggggtttggatttggcatcggtttgggtgggttcggtggtcgtgggtcgtcattttctccatcaacaacagcatctcctaagtcaaagtcatcccctaaaagaggggaaagagcagttaataccaaattccagagagaaacgaggaaggaatgacctcgtgaacagatcataaa

SEQ ID NO: 37563 - DNA, 373 bp, Homo sapiens
gaaggcttccttgaggacatgaggcttaagcttgaaggattagtcagatggttaggggaagaaatgttctatgaagaagcagtggtacgtacacagacctaggggtaagagatcatagagtatggaaagaatgtgaataaatcagtatgtgtggagcacagagtaggggtaaagttaatgaaaaagaaagaatggagcaaaagctagatcacaaaacacactgtaggccacactgaggaatttagagttaatgcttggtgtagtgtagttgggcaccagtgcaggtgtgttggttcgggtcctttacctgttttttttaacggtttgccaaagacagggattaacatgcaacaattgtattaggggaaatgac

SEQ ID NO: 37564 - DNA, 382 bp, Homo sapiens
  misc_feature (1)...(382): n = A,T,C or G
tgtgtgtgtgtgtttgtagaggtgggggtctcacaatgtggcccaggctggtctcgaattcctgtgctcaaccgatccttcaggctcccaagtgctgggattccagtcatgagccaccaccctgcctagcctgtttgtatgtattaatttgctttatccctgctttgcagaggagggaaactgaggcacagggaagcaaattaacttgcttagtctatatctcaactctttgcatccctcttttgcaggtggggaaactgaggcatggaaccgttaagtgatttgccaaaagtgtcaaaacttggctgggtgtggcgtctcacccctataatcccagcactttgggaggctgagacaggaagatcccctgagcccangagtn

SEQ ID NO: 37565 - DNA, 385 bp, Homo sapiens
ctcttctgaactcccccaagtctctttctctcttgctcccggcacagcagccagaccaacgtcttaaaaacaggaagctgtctctgctggcttaaccctctgatggctcctagtgacctgaagaggaagccaaagttcccagactgacccgggcagccctaactgcctcttcttttactcttctccctcccctgcccaccattcctcttcaaccttgccaagttctctccaccttggggctctcaccccagctgcttccccttggaagtgttcccgatcccctcagcccctcccaactgaggctcagttatgcatcagacaccctcactaaacacagaaaaaggagggtgggggccttgacaggggccctcaactgaattggact

SEQ ID NO: 37566 - DNA, 354 bp, Homo sapiens
gcaggacccaggccacacaatacaccgaggccctgggttggggcccgccatgcgtgctgactctacgaccacgtatatttgtgcaccagaagcacagtgtccctctttggactgaacaatgatgcccctaaaactggaggctgctctgctgagaaccaaagaccctggagatgggccttgcctgcatggtgccatcttcccgagcacctggctgctattgtatgccggacagagtttggcttgttacagtcatggctgatttatttcatatattttaaaaggataatcatgttactagcagaaaggtattcctctaatgtaaagtcttttttttttttattcttttgggcggga

SEQ ID NO: 37567 - DNA, 381 bp, Homo sapiens
atttctggcttactagatatttctaatttttttagaaacatattaatttgatactaagaaaatcattttaaaaatataaaggaataactaaaacaagtacagcattacttaggttaacatgttctaaataaactctcaaaatacaggagttccatcggttcttagaacttcaaatagtgatgtctcctcagtctccaaatgctggctataaaggttaagaaaacttcgagattacatatattaataaaaagaaatatttctaataggataagttaataagactcctcaaatagagttactacaggaagtctgcatcatttattgaaccactcccacctgaacaaccaagagtttaagacacaaatccaatttatctatttg

SEQ ID NO: 37568 - DNA, 371 bp, Homo sapiens
gttttagaaagttcaatttcggtatttgatcactccttccaaatgctcgtagaaaaggcaacccatcaccacaaaaggttgatgaagagaagaatacagtaggagctttgtttatataggtgcaaattataagaattaaaataagttcaagagcacaggatcttccacttccatgaagttggtctaaacatatgttctttggacttaattttggttcaagtccaatctgtgcagggacctatataagcacacatggaatctatcttacactcttaattctggttttgccaagaaaaagataaagaattttaagagctggaagcgaaggggttatctgtgtccccaccaaagcagctgaaatgctgcaaagc

SEQ ID NO: 37569 - DNA, 391 bp, Homo sapiens
  misc_feature (1)...(391): n = A,T,C or G
cagacatataagagacatagcctttggctgtggtaattgtggcaaaacctttccccagaagtctcagtttattacacatcacagaactcatacaggagaaaaaccttataattgtagccagtgtgggaaagccttctcccaaaagtcacagctcacatcccatcagcggacacatacaggagagaaaccttatgagtgtggtgaatgtgggaaagccttctcccggaagtcacatctcatatcgcattggagaacacacacaggagagaaaccctatggatgcaatgaatgtgggagggcctttagtgaaaagtccaatctcattaaccatcagagaattcataccggtgagaagccttttgaatgcagggaatgtgggaaagccttcagn

SEQ ID NO: 37570 - DNA, 388 bp, Homo sapiens
ttgataacgaggaagaatcttgttgagctaacaggaagaaggttgccatgttttctgtcaaatactaataatagccgaaagaaagaacgatagacagaatgaatgaatgaaagaacgagagttgccctcaagaaagaagtatacaagctcctggtattcaaaaaattaagtcatacttagagcctgaaatttctgtggttgtagggcatactataagagagagtttctaagaaaaccacttgttatggaatgaattgtatgtccccacaattaatatgttaaagccctaattagggccctaattcaatatgataggtgtctttattagaagaacaagatgctgttaaggccaagtgaggacagatagagagtgcaccatctgcaagcg

SEQ ID NO: 37571 - DNA, 366 bp, Homo sapiens
attgaccatacaaagctggcttatcttacttgtagaagagtgtttggcagctgaaacccaagggaaagaaaggaagtgcgtcattataggcaattcaggctagatattatactaggtacttcatataccctctttttttttttttgcccccaccaaaaaaagggggtttggttttgcaccccatttgggagggagggggaaaaatatgggttaattgagcccgggacctctggggcccaagaaaccctcccttttttgccttgagaaccggggacttaaggggccccccccaaggccaatttttttattttttttgaaacaccgggtttgcttgggttgcccaggtgggtttaaacctcctggccc

SEQ ID NO: 37572 - DNA, 389 bp, Homo sapiens
  misc_feature (1)...(389): n = A,T,C or G
cttatattgtaaatatttagatgggttctctcacttttctttgatactactgattttcagcaagtgaattatataattcaaaatgctagaaatgtctatccgttctataagagagcatatcctgccgttcttgcatgcagtgaagccctgcccgtcgaaaatcattgcatctgtgactttcaaagtggaaaaaaaaatgttatttttttgttgatttgtaaagagagtttaaatgtcatgtgaaaaaaaatagaatgtagtaaaattctatatatttatgaaatattttaaaggcatatttttttaaatatcaaacggggctattcataaaaataaactgattgtatgtcaagatgtcctaatttanaagagtagttttataaatcatg

SEQ ID NO: 37573 - DNA, 388 bp, Homo sapiens
cgggtccctgtaatcccagctactcggaaggctgaggcaggagaattgcttgagcccaggaggaagaggttgcagtgagccaagatcgtgccattgcattccagtctgggtgacacagcaaaaactccgtctcaaaattaaaaaaaaagaaaggaaaacccccaaccttacggccgggcatgagggtacatgcctgtaatcccagcactttgggaggccaaggcaggtggatcttttaagcccaggagtttgagactagcctgggcaatatggtaaaaccttgtatgtaaaaaaaaaaaatttaagttaatttagactttgttacataaatacttatataattatttaaataattgaatttatttgttggaaaattacccaggcgtgg

SEQ ID NO: 37574 - DNA, 374 bp, Homo sapiens
ggacaagggctatggccaagcagagggtcctgtttaattccttatgcaaatattgattacatgcttatcatacaccaggtactgtggtaaggttttgtcctatggggtcgaagttagatattgaaatatatgtctataatcactgtgatatgctgagggaagaaagattccaaatgctattggagcctggaagaagggcaggtgagccagtgatcagggaagattccagagaaggtgggatttgacctgagactgaaagatgggtatgagtttacctggtggataggggaaggcattttataaagcatgtgcaaaatagaaacagtatatttgaggactcctacatagagtatgatggacagggggtaagacaa

SEQ ID NO: 37575 - DNA, 386 bp, Homo sapiens
  misc_feature (1)...(386): n = A,T,C or G
taatttctgggcctaaagaggacctcgctggagatgagaagagaaacaccagtcccagatacagaggagagggcggtgttcaaatttctaggaccaggaatctggtgatatttccagagcaagaaatcagagatactttggtctttctgtggagctttggcagagctggcagaggatggggttaggggctgtaagactgaggccaatcggacgtgggaggcaggagtctaaggggaaaggaggaggaggcctggaaacccctcaatttgctgaggaatctgcctctgtggagggatggggtagagtggccaggctcagctgtctgtggaacactaagaggaggtttgggcttgagaaaattctggggggctaggggcactagtggn

SEQ ID NO: 37576 - DNA, 389 bp, Homo sapiens
cagaagttcacgccaaatcagcgaagattctgaaaggactggtggttctcccagtgtccgacatggttccttccatgaagatgaggatcccataggctcccctaggctactgtcagtaaaagggtctcctaaagtagatgaaaaagtcctcccctattctaacataacagtcagggaagagtctttaaaatttaatccttatgattctagcaggagagaacagatggcagatatggccaaaataaaactatctgtcttgaattctgaagatgaactaaatcgttgggactctcagatgaaacaggatgctggcagatttgatgtgagtttcccaaacagcataattaagagagatagccttcgaaaaaggtctgtacgagatctggaac

SEQ ID NO: 37577 - DNA, 373 bp, Homo sapiens
  misc_feature (1)...(373): n = A,T,C or G
ctggagtgcaatggcaccatctcagctgactacagcctctgcctcccacaggcgattcttctgcctcagcctaccaagtaggtgagactacaggcacacgccaccacgcatggctaatttttgtatttttagtagagacggggcttcaccatgttggccagactggtctcgaactcctgaccttgggtgatccacccgcctcgacctcccaaagtgctgggattacaggcgtgagccaccgtgcccagcctccctgctggtttaaatggactctcactgtccagttcgtgtccatgtttctcccatttgtatctttgattaaatctagaatgagcctttggttatgagaaaacatatcagagagggagagagn

SEQ ID NO: 37578 - DNA, 385 bp, Homo sapiens
  misc_feature (1)...(385): n = A,T,C or G
catggcattcctttggcttgtgtcctgctttgcccttgtgggcgccacctttggctgtggggtccctgccatccaacccgtgctgaccggtctgtccaggatcgtcaacggagaggatgctatccctggctcctggccctggcaggtgtccctgcaggacagaactggcttccatttctgcgggggctccctcatcagcgaaaactgggtggtcactgctgcccactgcggggtcaagacaaccgatgtggtggtagctggagagtttgatcagggctccgatgaagagaatgtccaggtcctgaaaatcgctcaggtttttaagaaccccaagttcaactccttcaccgtgcgtaatgacatcaccctgctgaagctggccacn

SEQ ID NO: 37579 - DNA, 387 bp, Homo sapiens
  misc_feature (1)...(387): n = A,T,C or G
ctcggatctggtcaactttgccttctatcactcgggggaatatcgaagaatctgctcctttgcaaaacagataaatttctcctgtagcagattttacaattacactcattctccttctgactgagtcaaaactcaaaatttccagcaattcaaacctttcgatgtggttctccctgtttaatatctccatgtaattgtccttcagccttaggtaggtaaagccaagtctctggacaccttcgaccagcgccacctcgtcgggcgaggatgagatgtacacacaggatttccccccgtccggcgatttcctggggccgtctacgctgtcatcgtctttcacctggacggtgtggcagagacagagggcccggaaaaacagctcctcgn

SEQ ID NO: 37580 - DNA, 380 bp, Homo sapiens
tcaaaaggttttatgagaatgaagataaatatatatcacagattcaaaacaaactgacaatttctgtaattatatgttaatatttgttgtgccttcactaaataccaggcactttgtgaagttttgacatggattattacattcaattttgttttctaccctatacagtaggtactgttattgaaatcattttgcagatgagcaaagtggagcttgaaatcaagctcaagcagggtgattccgtagcctacatgctacattactttgctgtgtttacgacataaacaaagacttggaaattgaatgtattagcacaatcctgaatccacagcttgtgcttttaaacactactggatcactctgtagtataactgtgccta

SEQ ID NO: 37581 - DNA, 362 bp, Homo sapiens
  misc_feature (1)...(362): n = A,T,C or G
cagacttctgacactcaccccctcccagacttctcacactcaccccctcccagacttttcacactcatcccctcccagacttctcgcactcacccccccagacttgtgacactcaccccccccagacttttcacactcaccccctcccagacttttcacactgacccctgccagacttnttacactcacccctcccagacttgtcacactcgccccctcccagacttatcacactcacccccacccagacttctcacactcacccctcccagactgctcacactcaccccctcccagacttctcgcactcacccctcccggagttctcacactcacccccccagacttgtcacactcgcccc

SEQ ID NO: 37582 - DNA, 380 bp, Homo sapiens
  misc_feature (1)...(380): n = A,T,C or G
agttgtcagagaagacttcttggaggaggtggcatttgagcaaagacctgaattcagtcaggagttcaagacctgcctggcaacatggtgaaatgccatctctactaaaaatacaaaaaatagccatgcatagtggcatgcgcctgtaatcccagctacttgggaggctgaggcaggagaattgctttaacctgggaggctgaggttggagtgagccgagaccacgccactgcactccagcctgggtgacagagtgagactctgtctcaaaaataaaataaaataaaataaaaaatacataatgcaatttcagataataatatgagccaagaagagaaataaagatagggaagaggaagaaagagtatacagtttgtgan

SEQ ID NO: 37583 - DNA, 370 bp, Homo sapiens
aaaatgaaagcctccttgcattggaggcccctgtgctgggtatgtctgtccatataatcctgccttctgatccatcattactgctgcttcttggccttggaaagcatcctgtttgggctctaatgcctgtccctgattgacaagttcaggaatgcccaaagctctgtcaatttcttccaggcctgtggcatctgtgttgctgagaagagtgtgcagctggtccaataatgctctttcgtcactctggccttccaggttggaaggtggcccaacaagatcatccagggaattcctaagaagaggcctattttgagtgccatgagaaacttgttccatggacaacatgccatcgggccaggaacccagttgg

SEQ ID NO: 37584 - DNA, 383 bp, Homo sapiens
tattaattcagactgaaaataatacattgaacccaacaaggttcacatgagaccagtgatagtggtataatggctgctgctaatgaggcacctgaaatcactgctaactgataaaatcagtacaatttatcaagtgcttattgtttgcaagaaactgagtgctttacatgtgtgatctgtttttcctcttagaacaggctagctatatagatattattatcctcaattttcttttgcccacttttttgagatggggttttgctttgttgcccaggctggagtgctgtggctatttataggtgtgatcatagcgctctacagccttgaactcctgggctcaagtgatcctcctgccttagctgggactacaaacatacaccact

SEQ ID NO: 37585 - DNA, 392 bp, Homo sapiens
gaagaccagggatgggggtgggggtccctgagctcatgtggtgccccctttccttgtctgagtggctgaggctgatacccctgacctatctgcagtcccccagcacacaaggaagaccagatgtagctacaggatgatgaaacatggtttcaaacgagttctttcttgttactttttaaaatttcttttttataaattaatattttattgttggaaaaaaaaaaaaaaaaaaaaaaaagggcgccccggccggaaatcccaaatttagaaatggaaaaaccggaaaacccccgcaggtgcctttaaagggggcagggggcccaattaaaatttttttaattaaaacaccgttgggccttttttaaggaaacaaaactcctctaggttcaaat

SEQ ID NO: 37586 - DNA, 351 bp, Homo sapiens
ggtcaatgtgtgtgaagttgggaggcagagctgggaaaggggatttcttcatcgtggcaaattttgttcatgtggatctgctgctggtattgcttctgcttctccaagaattgctggtgttgctgttgaatgaccagctgatccaacgtgctctgaggcaaaggtgcagactgggttcggttcaggggtctgtgacggggcaatttgtgggtacctctaatgccaggtgaaattctctcttttgttgccaagggagactgaggatgtaagggaactccaccagctacaagaagcttttgctgtcgcatttgttctttcaataataaatgctgcaggagagcctggtggctg

SEQ ID NO: 37587 - DNA, 363 bp, Homo sapiens
gcaggacccaggccacacaatacaccgaggccctgggtaggggcccgccatgcgtgctgactctacgaccacgtatatttgtgcaccagaagcagagtgtccctctttggactgaacaatgatgcccctaaaactggaggctgctctgctgagaaccaaggaccctggagatgggccttgcctgcatggtgccatcttcccgagcacctggctgctattgtatgccggacagagtttggcttgttacagtcatggctgatttatttcatatattttaaaagtataatcatgttactagcagaatggtattcctctaatgtaaagtctttttttttttttttttttggaaacaggagccccctt

SEQ ID NO: 37588 - DNA, 367 bp, Homo sapiens
  misc_feature (1)...(367): n = A,T,C or G
ctggcctggacttttattagttttattatttagacagctttccagcacaaccttgcaaatagggaaatagtgagaaaatcatggtctttggaaccaggcaggaccagggtcaccctgactctgctcagctgttgtcattgaagggggtgtggagatactgaaacttccgtgaaccttagtttccttgtctgtaaaattaagaaaccttagtttccttgtctgtaaattaataactaaaaccaaaatattaactacctcaaagggtagtgtgaggatcaaatgcgataatgtccacagattgctaactaaattaagctccttcctttggggcacatagagaacaacttccagggagaaaaacaaaacn

SEQ ID NO: 37589 - DNA, 357 bp, Homo sapiens
  misc_feature (1)...(357): n = A,T,C or G
gccagatctggaaggtggctgcggaacggttttaagcggaagatggaggagccggaggaaccggcggacagtgggcagtcgctggtcccggtttatatctatagtcccgagtatgtcagtatgtgtgactccctggccaagatccccaaacgggccagtatggtgcattctttgattgaagcatatgcactgcataagcagatgaggatagttaagcctaaagtggcctccatggaggagatggccaccttccacactgatgcttatctgcagcatctccagaaggtcagccaagagggcgatgatgatcatccggactccatagaatatgggctaggttatgactgcccagccacn

SEQ ID NO: 37590 - DNA, 381 bp, Homo sapiens
ctccatgttcgagatagggaaactgagggccagggagaggcagtgactcgcccgagggcacacggcagaatgcaggcagaggcagagtggccctgggcatcctgagtccagttctgggcactctgcacctcacaggcctggactcagtccttgccaccaccactctcagagtccttctcatggaggggcttcaggcagccgggatccccagcctcttgcccagatgccagctgctcagagtcttctgcagggattccattcgggacacctctgccagcctccatcttctccttcaggttccgtttgaagaaaccaaccttgtacagcactatgaaaatgagcagcagcagcagcagccccccgatgccgctcagcacgtaa

SEQ ID NO: 37591 - DNA, 373 bp, Homo sapiens
  misc_feature (1)...(373): n = A,T,C or G
gttttatttcaaattattattaatgaatgaaaacaagtcatacgagctaaaaatacttttaaactgagttcgtttttcataagaaaaaaaggaatcaaattttagtacgaagaaagcatttcccaagcaatgagtctcttaatggaaaaaatataagagccacgtgagtaaactttccttcatagaaaggaaagaaacctaaatctgatatggcaaatttggaaagataaatatttcctagtcccataatatgtgtttgttttacaagatatgcttgaatgatgcgaatctatgaagcagggatctgtggcaatacaaattcatccaccagaactccatcccttgtttttgtatcagngggaacaccttctgg

SEQ ID NO: 37592 - DNA, 358 bp, Homo sapiens
  misc_feature (1)...(358): n = A,T,C or G
ggcgccggcggctttggtgactctagataacctcgggccgatcgcacgccccccgtggcggcgacgacccattcgaacgtctgccctatcaactttcgatggtagtcgccgtgcctaccatggtgaccacgggtgacggggaatcagggttcgattccggagagggagccttttgtgacaaggtcatgagatggttccaggccatgctgcagcggctgcagacctggtggcacggggttctggcctgggtgaaggagaaggtggtggccctggtccatgcagtgcaggccctctggaaacagttccagagtttctgctgctctctgtcagagctcttcatgtcctctttccagtcctn

SEQ ID NO: 37593 - DNA, 359 bp, Homo sapiens
ctcagggctgtcatcaagactgaatgaaatggttgtaaatccacaaatatttatagtgctttactactaagggaggagaccacccctcatattgtcttatgcccaatttctgcctccaaagaagtaaaaactaaaaggcagaaatgaaatccacaggcagacagcctggcgccgcgacctgtgtctggttaaagatcgacccctgacctaaccggttatgttatctatagattccagacatcgtatggaaaagcactgtgaaaatccctgtcctgttctgttccgttctgataaccagtgcatgcagcccccaatcacatatacccttgttggtcaatcaatcacgacctcttcatgca

SEQ ID NO: 37594 - DNA, 369 bp, Homo sapiens
  misc_feature (1)...(369): n = A,T,C or G
gttggggcgcaccccataatcccagctactcaggaggctaaggcatgagaatcgcttgaaagctgggaggcggaggttgcggtgagccgagatcacgccactgcactccagcccaggcaacagagcaagactgtatacacacacacacgcacacgcacacgcacgcacacacacacacacacattcatacacacacacacaagtaggtaaattttattccagggatctctctatgccagngctacttggtagtatgttgaatggcagcctcagcctcatctgggagcttggtagaaatgcaaattctttgaccacccagatctactgaatcggaatctctaagggagggggtcaagcaagctgttttaa

SEQ ID NO: 37595 - DNA, 365 bp, Homo sapiens
tctcaatccacttgcctcagcctcccaaagtcctgggattacaggaatgagccactgcagctggccaaaacatacatttttgttactttgttgtttctgagaattcccatcctctagtctctacccagcaagaagtgtttctgtaccttcatttatttacttccctgtggttgctaatgtctctgctgtgtttaaagaaagctaaaatataatttttaagtgtaggatcctagctttgtcctgtgtgtccatgtatctttggtttgcctctaatctcgaatataagttatgttcaatcccctcaaggcagtaaggcttctgtcgtctcctgatgaatctatgcttgggtaagtgagattgcccaa

SEQ ID NO: 37596 - DNA, 385 bp, Homo sapiens
ctgagagcccagggcccttcctccgttttaagggggaagcaacatttggaggggacggatgggctggtcagctggtctccttttcctactcatactataccttcctgtacctgggtggatggagcgggaggatggaggagacgggacatctttcacctcaggctcctggtagagaagacaggggattctactctgtgcctcctgcctggactgctgccaccccgggtgctcccgctctgccatagcactgatcagtgacaatttacaggaatgtagcagcgatggaattacctggaacagttttttgtttttgtttttgtttttgtttttgtgggggggggcaactaaacaaacacaaagtattctgtgtcaggtattgggctgg

SEQ ID NO: 37597 - DNA, 376 bp, Homo sapiens
ctcaactctcagagcaatcacagtgatggtgtaaagagcctctttgaatgcgtgattgcatacctagtgaccatacaatcagagatctggtcataatgaaacactttatacagacaggaatagacaagggatttctgacacactcatgctttggatgtgtcagtacaagacagtatgtgagactgtgattctgccaggcagaggggaacgggcatgatttatctgctggcaaataagtctccactatacctaatcattcttttatctaagtgcatcatgatcttcttagtcctggacgtcaaaatagtcaattattggctccttggttattttctgtaaattactgctcccaggattcttgtctgactgatgtctg

SEQ ID NO: 37598 - DNA, 354 bp, Homo sapiens
gaaaaaacggcctcttttggataatcaggtgataaattcagtgtgtgttcagccagagctataaaactgattttaagatatttacaatatatgggacgattttcgctgaattagatagtggttgtgatattatataaagaaaaaaatggctgaggacaaatgtagaaaagaattgatcagtgatcgtgcatttcactaaagcgttctattgctttagtgaagcatactcagtatcttcagtatcagtagaaaagatactcagtatcttttcagtttgggatatgatggtcactgatggccatcagcattcattgcccagtgtgtgaggccactatggatgaaagttgactattg

SEQ ID NO: 37599 - DNA, 363 bp, Homo sapiens
gtgtataacatgggaacatttgctattaggctgagcatctctaatctgaaaattcaaaatccaaaatccaaaactttttgagtactgacatgatgccacaaatggaaaattccacacctgacttcatgtgataggtcacagtcaaaatgtaggtgcacaacatatagtctattcagtgttcccaagggaaaaataaattaccttcaggttatgtgtataaggtatatatgaaacataaatgaattttgtttagacttgggtcccaactctaagagtatctcattatacatgtacaaatattccaaaatccaaacatatctgaaatctgaaacttttagtcccaaacattttagataagggatg

SEQ ID NO: 37600 - DNA, 364 bp, Homo sapiens
cctatatgtaacttgtgaaaatggactttgattttatggttaatgggctcttttgtgattaaaaatttggttttatttgtatgcatatatgttatgaagctaggcatactgtgaagagttttggtattgatacacttaattatttattgtgaactattaaatagaacacccagattggagagataaccaagttttaatacatcgcttaacattccttttaaacatcataaacatgaatgttctgaatctgcgggagaacaccgaacagatgatgttaataatgaactgaagcttgtaacatcttctgatactgtgcaccagtgaatacaaaataaaacaaataatttgtatgtatggagtggaa

SEQ ID NO: 37601 - DNA, 382 bp, Homo sapiens
gagaggttagccacagggaggatgtgacttgcattgcactagagggaaaggatggatgccaaagcacgagagtttgcaggtttcaagggagggctgtcagacagcatccatttaatagcttgaagcaagagactggtcatttgctgagatttggggctgtgggaaggacctacggtttgagacattctgaaatgctgaccagaaagcccactgttgggggaagacgggtttagtgggaagggcaaattgagagacgaggtccaccaagcagctctcagcagtttgaaggcttcaagttgttattcatgcatatcatggaacaaaagaataacaatgattaaccattaatgccatttatatcctaattcagaaagcttactgg

SEQ ID NO: 37602 - DNA, 361 bp, Homo sapiens
agatggcctgccctttccccacccagcaaaggacaaaagttgatgcttggaaaagttaaaccaaggggaccacataaaaataaaggtgcaatgagctatgaccatgccactgcactccaacctggatgacaaaaacttttatttttttttttttttacagaaaagaaactttttttttttacccaggactgaatgcgccggcaccaccttaagaaaatgtttaccaaaaaaatgtttttccttgtgccttttttaaaaaccttcttaaaaaagattcccaccctatttgggagcggcccccagggaaaaaaacgtgtgaagaaccccgagttggtgtcgcaaaaaattcactccgaaaaaa

SEQ ID NO: 37603 - DNA, 373 bp, Homo sapiens
caaatgaaagcctccttgcattggaggcccctgtgctgggtatgtctgtccatataatcctgccttctgatccatcattactgctgcttcttggccttggaaagcatcctgtttgggctctaatgcctgtccctgattgacaagttcaggaatgcccaaagctctgacaatttcttccaggcctgtggcatctgtgttgctgagaagagtgtgcagctggtccaataatgctctttcgtcactctggccttccaggatggaaggtggcccatcacgatcatccagggaattcctaagaagaggcctattttgagtgccatgagaaacttgttacatggacaacatgccatcgggccaggaacccagctggttg

SEQ ID NO: 37604 - DNA, 372 bp, Homo sapiens
  misc_feature (1)...(372): n = A,T,C or G
aaaaaaaaaaggggaggggacaaagaaccaaaaaaggatgatcaaaaggggacccccagcccttggaggaaaaacggcagcctcaggccgccacaaaggattttggggagtcgccccaggcctgacggcgtaaataatccctggctttcatctttatgctcttgcaggggatgctcaaaatgccttggggttcgacccctgcacggagcccccagcccagcctccccgggggttgaaaccttgatctaggcctgactgtggctgctctggggacatgccctcgtcctttgctgaagctgaggctccaaagggggagtcactgccacgaaggttgcccaaaactttccttgctgcaaaaagccccaagacttn

SEQ ID NO: 37605 - DNA, 371 bp, Homo sapiens
ttttttttagatctcattagttttatttctataacctttcgatctgatgtcacgttagattttgtcacaactggatttagtggaagcaggggaatcaagttcactattttctgaaacacacaaaaaagggatgggaacaatgacttagaactaagattgctcataaaagaccatcagaaagatccctaaacaaaagctaaatagttatagttaatggtaactggcaagggatttaatgcatttgctggtattaagtttcttatggaatgaatgaatgaacccagcagcattttatgacacagctgccagaacatcccatagaaaaacaattttgtaggaacgtgatggcaacaatcagcagccaatattct

SEQ ID NO: 37606 - DNA, 374 bp, Homo sapiens
gaaagatagtgaaaatacacctgttaaaggaggaactgtagcggatctaggtaagcacctaaaatctatacactggtctgtgctttctgtcttgaatatgtcatctcctttgatagtctattcttccaaggtcttgttctgttggtcaggctggagtgcagtggtgtaatatagctcaccacagctttaaacttctgggctccagcgattttcctaccttagtcttccaagtagttcggattataggcacacaccaccatgcccagcttgatacactccttcttttcttttttttttaagacggaatctcactctgtcacccaaagcttgcagtgagccgagatcacgccactgcactccagcctgggcgacaa

SEQ ID NO: 37607 - DNA, 322 bp, Homo sapiens
gtgtgtttgtgtgtgtgtgtgaatgtgtgtgtgtgtagataagtgtatatacataaatacactcttctaaagttgtatatacatatgcacattacatacattttaatttattgacaaaattaaccaaattaagatttggagatgtgggatgttcttgttttaaaatagcatgtttgaaaccatcagtttgtgtctaaaattagctgtagcacatggatgttgtccatattaagctatttgctgtttgaattatagaggtctacagtatttgtgttggcatagtttttgtaaaaaaaagattaaaaaatagtcgacgcggccg

SEQ ID NO: 37608 - DNA, 377 bp, Homo sapiens
actagaaacactgactcggaacaagttatttaatctctcccaacctgtttcctcatctgttaaaaagaaagccaaaaagataacaatagtatagtcgattctcattatgtgtggtagtcacattctataaagttgctgtaaacactgaattagtgaacagcgaagcatccagcctagggaaaaaatatagaattaggttcccgggagcctctggccacatttttgttactgatcaatacataaccttgttttatgtgggtttctgtttgaagataccttatgcagcaattcacagccaacagcactataactcatgcctgaacaaagcttatctaagactttttctctgtaaggcacatcacagccaccttctgctg

SEQ ID NO: 37609 - DNA, 394 bp, Homo sapiens
aagaagatgtgaatagatggagagacataccaagtccatggattggaagagtaagaatagtaagaatgtcagttctttcccaacccaattaataatacatatattaatacagaattcctcatattgatatagtattaatacaggaatactagtattcctatcaaaatttcaggaaggttttttgtactattaagggaaaatgaaaattgaagctgaggtttggatatacccctaggccaactgcctgtagccatgtaactgaaacttaagctttcctccctcagtgtgatagctttacaaagaaagcttatgcagctccacatgcacagtagggaacaatattcttcctcattcatgctttataaactgtgttggaactgctgtgaattggggt

SEQ ID NO: 37610 - DNA, 362 bp, Homo sapiens
aaacaatttgccccaagcccttcctgcgagaaaattgaaatcattgctacactgaagaatggagttcaaacatgtctaaacccagattcagcagatgtgaaggaactgattaaaaagtgggagaaacaggtcagccaaaagaaaaagcaaaagaatgggaaaaaacatcaaaaaaagaaagttctgaaagttcgaaaatctcaacgttctcgtcaaaagaagactacataagagaccacttcaccaataagtattctgtgttaaaaatgttctattttaattataccgctatcattccaaaggaggatggcatataatacaaaggcttattaatttgactagaaaatttaaaacattactcg

SEQ ID NO: 37611 - DNA, 348 bp, Homo sapiens
tctacctttactttctgatatggttttgccatgtccccacccttagcagtcatgtgaccttgggggggtttacttaccttctctgtcccaacaacttctgtaaaatctgtaacatgagattgtttctgagggttaaatgagcatagcacagtggggacactgtcaggcacacactacttgccagatgtcgagtattcatctttattgaaataggactgtggtaagccactttatggctctcgattttgtatgagaaaatcatgtttagtgccttgttagtaaaagaaagaaaatctgaaagtccctgccatggaaggaagaaatagcggggagaaaagggagttggtt

SEQ ID NO: 37612 - DNA, 143 bp, Homo sapiens
cagatattgcatttagttatttattatctttttagtcttttaatctgaaatatatccatagcctttttttaaaatgttttctgacatcaacctttttgggagaattacagtgtatccctcctccctccacgtcgacgcggccg

SEQ ID NO: 37613 - DNA, 375 bp, Homo sapiens
caagccatagcattacatttcacaaaaacacttccataggaagttatgataatatgattatcaaggaatgatgctttcaggcatggtattcaggaacatatgataatatgattatcaaggaatgatgctttcaggcatggtattcaggaacatttctcctttcatcagcaaaaagtcatttatacctgtttttaaaaatcacttattgaaacttttttctcctttgagcacctttatttacatttgttcttccagtaagttcaacctaaaccaaatgagaagagacaggccacttggacaacaaaagtagtttctgttgactgcacagtctctgagccccgtttccatggagactgaaccacatcctgccaaggg

SEQ ID NO: 37614 - DNA, 373 bp, Homo sapiens
ttttacacaacaaggtgcatttattgtttctgacaagggcatagtaattttcagtttgctcatgttcctagcatcacacatctgaggtacaattttgcttctcaatgaaaaacatatactctgaaaagtgattaggaaggtctaaaaattttaatcattcatagagtatcttaaaaatccttatcaagtaagatattaactttacctttataaatctttgcgtgaaatgaaaaaaaaataaaggcatacaaattctcattgtgtgctacatttttaaataccatcctttgtctccgttaaaagattttcatccatttattcaaaaaccttttaagatcaactgtccactttaagacagagtgaagacattttt

SEQ ID NO: 37615 - DNA, 371 bp, Homo sapiens
tgatagctgggactgatactggagacagcggcccggcaggacagctccataatgaaaatgcggctcttggggttgggggtctgtttggttctctggcccctgcattctgagggggctggagggaaactgacagctgtggatcctgaaacaaacatgaatgtgagtgaaattatctcttactggggattccctagtgaggaatacctagatgagacagaagatggatatattcttgccttaaccgaattcctcatgggaggaagaaccattcttacaaaggtcccgaaccaggggttttcctgcaacatggcttgttgtcagattctagaaactggggcacaaaccttgccaacagcagcctgggcttaatg

SEQ ID NO: 37616 - DNA, 378 bp, Homo sapiens
gttttatttcaaattattattaatgaatgaaaacaagtcatacgagctaaaaatacttttaaactgagttcgtttttcataagaaaaaaaggaatcaaattttagtacgaagaaagcatttcccaagcaatgagtctcttaatggaaaaaataaaagagcaatgtaattaaactttccttcaaagaaaggaaagaaacctaaatctgttatggcaaatttggaaagataaatatttcctagtcccataatatgtgatgggtttacaagatatgcttgaatgatgcgaatctatgaaacaaggatctgtggcgatccaaattcatccaccagaactccattcttgttttttgtatcagagggaacaccttctggaatgg

SEQ ID NO: 37617 - DNA, 366 bp, Homo sapiens
atcacaatggggtttgaagtgaatggttcagggtgaagtgtatgatttgaaagtgtgcatggtacatgtagggtaggtggtcatggggcacagagagccacatgacgtgtgctgagctaaacaaaagggaacttgtgagggtctctgtgcctagcactgtgctaggctatgggaaggacatgaataaaagcaaacatgctcattcatctttattttaaaatgttggactaggttaaacatacacaggctaaaattcaaaaggtacaaattgtatatttttcacttggatgaatctatctgtaggataaataccttaaagcagaattattggataaagaaaatgtatattttaaattttgatagata

SEQ ID NO: 37618 - DNA, 376 bp, Homo sapiens
aaaaaaaaaaggggaggggacaaagaagcaaaaaaggatgatcaaaaggggacccccagcccttggaggaaaaacggcagcctcaggccgccacaaaggattttggggagtcgccccaggcctgacggcgttaataatccctggctttcatctttatgctcttgcaggggatgctcaagatgccttggggttcgacccctgcacggagcccccagcccagcctccccgggggttgaaaccttgatctaggcctgactgtggctgctctggggacatgccctcgtcctttgctgaagctgaggctccaaagggggagtcactgccacgaaggttgcccagaactttccttgctgcaaaaagccccaagacttctcct

SEQ ID NO: 37619 - DNA, 368 bp, Homo sapiens
atccaagcagttctataatcaaacttatggaagcaggaagtacaaaagtgattggggctattctggtaggggtggatatcaacatgtgagaagtgaggagtcctggaaaggacagccaagcagaagtcgggatgaaggttatcagtaccttcactcccatactggacaagacattttggacatgagttcaagggggcaggttaattcctggcattgccagttttcttcattcagaatctgtttgttgatcaagtgactgtccccgtaaaaagtagaagataagtttgttaaagtattttttataaacagcttaatataaaacattatagatttagtgtttggcttttttccttataagtttataagtt

SEQ ID NO: 37620 - DNA, 369 bp, Homo sapiens
  misc_feature (1)...(369): n = A,T,C or G
gctgaattttaggacaaacggatgttatagataagctggtcccattatctaatagcttacaaagaaaaaaatataatgtatacagtggttgaaaaagtaggagttacaaaaaaatgtgtttgcattttaacttttcaggagatgttacagcccagatagctcttcagcctgcactgaagttcaatggtggtggtcatatcaatcatagcattttctggacaaacctcagccctaacggggggggagaacccaaaggttggtatatattggtgcacccttatctacattttgtgcacagtaagaatcgattgttgatttactggaggtaacctatacctggttttttgttttttttgtggncgggttttg

SEQ ID NO: 37621 - DNA, 377 bp, Homo sapiens
cttacccagaaaataataatagttggtcaattctcacctggaaaatttttagagcttttaaaaatgaaatttcaaggccaggcgcagtggctcatgttgtaatcccagcactttgggaggtcgaggagggtggattgcctgacgtcaggagttcgagaccagccgggccaatatggtaaaacgccatctctaccaaaaatacaagaattagctgggcgtggtggcacacacctgtaatcccagctacttgaaaaaaaaaaaaaaaaaaaaaaaaaggcgaccgggccgggaatcccaaatattttaatttggaaacctgaaaaaccccgggaggttattttaattggggattgggcccctttttatttttttttttt

SEQ ID NO: 37622 - DNA, 356 bp, Homo sapiens
cttttgtgtcggttattcctgtgttcagatcctggctctgccacttactaccttgtagcctctttaagcctcagtttgtgcatctggggtgtaattatagtcccatgtcatagagccagagccacagggaggatgaaatgagatggtacaggtgaaggacttagcagagtgccttgtttgtattccaagctcaaggtagctatgattatttcttgctcattgtttttaaattgcaaaagcaaagcatgctcattgtaaaacatgtagcaattccaaataaacaaaagaatgaaagtttccctcccacgaggaaaatccactgctgtttggtgagcaaaccctggtcgacgcggccg

SEQ ID NO: 37623 - DNA, 376 bp, Homo sapiens
  misc_feature (1)...(376): n = A,T,C or G
ccattttgagtcttaatgtaaagagaagccacgatgaaaagagatccgtgctcagctcacagagcagatgaaatgcctggaccagcagtgtgagcttcgggtgcaactgttgcaggacctccaggacttcttccgaaagaaggcagagattgagatggactactcccgcaacctggagaagctggcagaacgcttcctggccaagacacgcagcaccaaggaccagcaattcaagaaggatcagaatgttctctctccagtcaactgctggaatctcctcttataccaggtgaagcgggaaagcagggaccataccaccctgagtgacatctacctgaataatatcattcctcgatttgtacaagtcagcgaggan

SEQ ID NO: 37624 - DNA, 371 bp, Homo sapiens
tttttttaaatctcattagggggatttttataacctttcgatgggaggccaccacacattttgtcacaactggatttagtggaagcaggggaatcaagttcactattttctgaaacacacaaaaaagggatggtaacaatgacttagaactaagattgctcatataagaccatcataatgatccctactcccaagctaaatagttatagttaatggtcaccggcacgggatttaatgcatttgctggtattaagtttcttatggaatgaatgaatgaacccagcagcattttatgacacagctgccagaacatcccatataataacaattttgtaggaacgtgacggccactttcagcagccaatattctt

SEQ ID NO: 37625 - DNA, 366 bp, Homo sapiens
  misc_feature (1)...(366): n = A,T,C or G
gtcgacgcggccgcggaagtttgcagtataattgtcttttaaaaataacattgatttcttctcaaagtaatatgtattgtcatatttagaaaatatcagcacagaataaaaaccacccataatccaccctgttaatattttagtttatatttttccagtcttttatgtgtgtacttattttatatatgtgtatgtgggtgtttcttttataaaaatgatatatgntctgttttggagcttgccatttttaatctaataatatatggtacgcaagaagctctttactctcatgattgttgttaaacagaaatgattttttctataacagggaccggaggaagactctttataaacaactgaacaggg

SEQ ID NO: 37626 - DNA, 382 bp, Homo sapiens
  misc_feature (1)...(382): n = A,T,C or G
tgatcctatttcaaacaaattacaaaagccactaaggaaaccaagtaacttctctggaaaaaatcctttcaggtactgcttaaaaccaacggttgccaggcgcggttgtaccttttttttttttttttttggacaggcatttaatttttttttgccaagcttaaaggtaaagggcacaattcctattaaatgcactttctgctgtgttaacaaagaagggtttttttttgtaaacaagaaaaaacaccccccctaaagatcggggaagtgttttatctacccctttttttttcagaaccctttttaaaaaaaaaaaaccctttccctttggaaaataaaccctttaccatgaataccccgagaggcattaccctaataaacn

SEQ ID NO: 37627 - DNA, 121 bp, Homo sapiens
aatttgaggggatgggaacgggcatgatcaaatgatgaagaatgattggcatagtgtttaaaacaatattgactttgaggatcttcccccactctgtgcacgtgcacacacacactcttgg

SEQ ID NO: 37628 - DNA, 380 bp, Homo sapiens
attacagggagctggtacacttaacatatgcaaagagctactgattgtttcattgcgaaccttttttaccataaaattttctactcttttcgctttttgtgttgagatctttaaagccgggtccaatttgtaaaaacagcattgctttctgaaattacggcccaattaataatcatcaaaaatttgatcgttccagttcccacttggaggcctttcatccctcaggggtgctatgggtggcttctaacaaaaactacacataatgatccctgattgccaacctttcccccaccagctaaggacattttccagggacaatagggcctggtccctgggaggaaatttgaaagggtccattttgccattccatagccgaaggg

SEQ ID NO: 37629 - DNA, 382 bp, Homo sapiens
  misc_feature (1)...(382): n = A,T,C or G
cagacttgggaagacatgcacacaatttgctgtcatgagttggtatgagttggctccagcacacaactggatctttctcttgaacttccattgttttttttctgtgtgtgtgttttttgtctttgtttttgatttgccaggacttaaagatgacaagccacaatttgagcctcagtttccttacctacaaaatggagatagtaactataaacccatctcacagcactattttttagaattcgataagatcattaatgtgaactgcattattgatactggttattcaataaaataggtatatgtactgggtatataggccaattttgttttatgtgctggaaaatgttggttntaagtactctgatcaccccactaattntan

SEQ ID NO: 37630 - DNA, 384 bp, Homo sapiens
gcggaaaaagcctcaagagctttcaaagaatcccaaaggcaaactgatagtaaaaactatgaaaccgagaactggtcaccacttaaagaaaaacttcagatgtgctgtgttaaaaaacaagacaactgattttgcagaaattgcagagcaagtgatcaatctggtcacctatagggcaaagagccatcaggattacattcctgtgcttctccttgtggatgattttgaagaacaagaaaatgtctactttctacaaaatgccatccattccgttttagcagaaaaggatttgcgatatgaaaaaacattggtaattatcttaaactgcatgagatcccggaatccagatgaaagtgcaaaattggcagacagtattgcactaaa

SEQ ID NO: 37631 - DNA, 386 bp, Homo sapiens
ttgggttgaatctttcaatctgctgccatccgcggcttgggggtcgaaggtccgggcggcgccgggtgcattccttccctaggtctctggcggctacgtatccgatcctgtcctgcgagcagggccctcgggcggccttgaccaaggcgacagtgaacacagtctgaagttccggcccaagacctgggcttgctggcaggagtcagctctgggcatctttggctttacggatttttaagtggccctttctccttgctctctgcagaaatgggcaagttcatgaaacctgggaaggtggtgcttgtcctggctggacgctactccggacgcaaagctgtcatcgtgaaggtatcagcctcgcgggactctgcgtccttgcatgccgg

SEQ ID NO: 37632 - DNA, 386 bp, Homo sapiens
gttattctcagacaattttcgccatcccaaccctatcccaagtgggcttcctcctttccccagctccccacagacatccagtgactggcctacagcaccagaaccacagagcctcttcacatcagaaacaatcccagtatcatcctctacagactggcaagcagcttttggctttggttcttctaaacaaccagaggatgacttgggttttgatcccttcgatgtcactcgaaaagccttatcagacctgattgagaaggaactgtccgtcaagaccaaccttccctttcgcccacatatgttcagaactcctcttcacacactacaaccgccaaagagccaggctctggattcctgcatcctgctgcagctacaaatgccaattc

SEQ ID NO: 37633 - DNA, 381 bp, Homo sapiens
ccctctttcctttccctcttgtcaggtcatccatgactttagagaacagacacaagtgtatccagctgtccacgggtggagctacccgttgggcttatgagtgacctggagtgacagctgagtcaccctgggtaagttctcagagtggtcaggatggcttgacctgcagaagatacccaaggtccaaaagcacaaggtctgcggaaagttctggttgtcggctgggcaccacggctcacacctataatcgagcactttgggaggccaagacaggaggatcacttgaggccaggagtctgagacaagcctaggcaacaaaacaagactctgtctctacaaaaagtttaagaaatgagccagacatggtggtgtatgcctgta

SEQ ID NO: 37634 - DNA, 298 bp, Homo sapiens
ctccatgcgcccctgttgatcgagatctactcctctactgggacttcctaggcatgtagcactcagatctatacaattgtttaaccgactagaacttgaggccataccttttttcgacctaacctgtgcacgtaaatacctgagcacggcccatctggaactttggcccttgttaacgagaagcttttaatttatttcttattgctcctaattaatatttatatgtatttatgtacgtcctcctaggtgatggagatgtgtacgtaatatttattttaacttatgcaagggtgtgaga

SEQ ID NO: 37635 - DNA, 375 bp, Homo sapiens
ggaaggtggaggttgaagtgagccaagatcgggccactgcgctccagcctgggtgacagagtgggattctgtctcaaaaataaataaataaataaaaataaataaaaaaattaaagggacaagtcagcaagggacagaggggaggtaaggactgcaaacaggaagatgaagtcaaagtctacagaaggagtcattcaacccccaagtccccacttccctccttgtagagggcagcacccctcaccaccccatgagagagattgaaccagggggctcacaaagtggggtcaccagaccacagtgggaggggtgctggattgcaaagagggtcagaggtgaaagtttccatactgaaaggtggcaccccagttccct

SEQ ID NO: 37636 - DNA, 376 bp, Homo sapiens
  misc_feature (1)...(376): n = A,T,C or G
caaatctcctagaattggataatgtattttctattaaaaaacctaatttctatagttttcttactagaaaatacattatccaattctaggagatttggagttctataaatattaggttttttaatatttctttttcatgccaataaaacctaattggacactaaggaattgcttatgcataaactaggtctctaatcacttcttacgatgtcagagataaggaattagattcatccttcaccaaaatagttattagggtctctcccactatattttactctctttgagtgaaaaagagtatatctctctagctcccacagcatctaacagaatatctcatacatatagcaaaccctccatatgtgttaaattatcn

SEQ ID NO: 37637 - DNA, 374 bp, Homo sapiens
gccagcttttatgggcagggaggtcaaagcaaacctgtctggagatgagacaggccaggaaaatcagggcaggggccagagtagggcaaatgtggtgcctagagcctcatttttttttttagacggattctcgccctgttgcccaggcggaggttgcagtgagccgaaatcgaaacattgccctccagcctgggcaacaagagcaaaactccatctcaaaaaaaaaaaaaaaaattttcacaaatttatttggtaggggttgcaaaaaatttcagctttgaaggtccggcatcctaataagtttcttatgggggaccattagaatagttcccaggggtttggttttggtttggctataaaaaagaaaaactgaa

SEQ ID NO: 37638 - DNA, 376 bp, Homo sapiens
aaaagagtctacaactgggttgctgaaagccagaaagattctctctgaaaattttggaagcatccatgtgtactttggagatcctgtgtcacttcgatctttggcagctgggaggatgagtcggagctcatataacttggttccaagatacattcctcagaaacagtctgaggacatgcatgcctttgtcactgaagttgcctacaaaatggagcttctgcaaattgaaaacatggttttgagcccctggaccctaatagttgctgttctgcttcagaaccggccatccatggactttgatgctctggtggaaaagactttatggctaaaaggcttaacccaggcatttggagggtttctcatttggcctggtatg

SEQ ID NO: 37639 - DNA, 369 bp, Homo sapiens
cgacgcaaacttgctaataaaattattaaaatctttaaattacttgcttgcagatttttgttaccaacaaataccattccaaactgacacaacctccctccagtccactgccacaaagtagcagtggccaaagtcatgctcttatcataaatccagatcatatcctttccccatgtgaaatgtttcaacaccttctcatcactcagaataaggcccacattttcatcatggccagcaaggccatggacaaccctactctacctccatccaactgctcctcatccacactccctccactgcactgtcctggctacacctgaacacacagggctcggcccctctgcatggctgtgtaacggctgtctctcc

SEQ ID NO: 37640 - DNA, 360 bp, Homo sapiens
caaatactttggaagaaagcattggtgtgtctttaaggttacataatcttgataaactttctgttagtcatattggttttaatataacagactagaatgagtgttggttggatgaacactgggctttgatcagttgatattttcccaggcattactttcctcattcgataaggcgttctaatagatgatctatcacatatgtgccactcttaacattttgattctaaaaatcttgctgtttagcattgagtctttctgctttattgaattctcaatctctacgcacaatttgaagaatcttcctcaatacaattacaaatacctgcattgctttctgagcaatcagagcctgtctactct

SEQ ID NO: 37641 - DNA, 371 bp, Homo sapiens
  misc_feature (1)...(371): n = A,T,C or G
ctcgggcagcacatcctcacagaaatctaggaactgttggtaggtttcttcctcgctgtactccaggcttgcttcggagtcatagtcatccctcctgcactgctcctttccaaacactgtaaacatgcttttaataagaagggtaggactggatgttgggaaatcatgtgaacatctatctccaaatctgcaagctcctgttttactgtagaagggacaattaactccatccttctccatgactctgaaatccaagggggggttccgggttttgccatgtggcgccattttccaactcattttcagcctgatccagcatcttctggacagcttccggtttttagttcttctgtcgnttctgttcctcctcn

SEQ ID NO: 37642 - DNA, 360 bp, Homo sapiens
tttttttttagataagagtcttgctgtcacccaggctggactttccacctccagagttcaagcaattctcatgcctcagcctccccagcagctgagattacaggtgcctgccactgcgcccgactaattttgtagttttagtagagatgaggtttcaccaccttggccagactggttttgaactcctgacctcaagatccactcacctcggcctcccaaagtgctgggattataggcgtgagccacccacacccaactttttttttttttttttttaaataaaagttttgtgtgcccccaggcgggacttgaactccggcctaaggggatccgtcctcctaaccctcccaaagggctgac

SEQ ID NO: 37643 - DNA, 379 bp, Homo sapiens
tgcaggtccccgtatacctgaccaccagagaacatctgtgccagaaaatcatgctcagtccaggattgcacttgccctgacagctatcagtcttggcaccgctcggcctcctccgtccatgtctgctgctggccttgctgcaagaatgttccaggttccagccccggtgcctctcatgagtgtaaaaaccgcaccagcagccaaccttgccagcaggattcctgcagcctctgcggcagccatgaacctatccagcgcctggacacctagcattccaacagcagtgaacctggctgactctcgaacgccagctgcagcagcggccatgaacttggccagccccagaacagcggtggcacctttcgctgtgaacctggct

SEQ ID NO: 37644 - DNA, 378 bp, Homo sapiens
gggaggctgaggcaggagaatcacttgaacctggggacagaggctgcagtaagctgagatcgtgccactatactccagcctggcaacagagtgtgactcttgtctcaaaaaaagaaacgaaaaacactaaaacatcagaggtgccttttggagtactaaacttactctataaggtaagcattaacatactcatttttaaagaaatattttatcaagcacccctaatactagtctgagataacccagactccagcaccctctcctctgcactccagcctgggcaacagagtaagactgtctcaaacaaaacaaaacaaaaaacagtatcttaacctgtacattatgtttctttatctagatataaacaacatcagccta

SEQ ID NO: 37645 - DNA, 370 bp, Homo sapiens
  misc_feature (1)...(370): n = A,T,C or G
ttttgttacaaggtacattatttagggcatggtgactgtangctcctactgtaaccattacctcaataatgtaccttgtacccatcaccaaatttataattattatgaagagaaaaggacaagctgtgtgcatgtgcttttggggaagaggggcagacactaagctaaatactcattttctatgttgacaagtcagtttggaacctaatcggtctccattcccacattactcttctctatgcatgtccggctctgctttgagatgctattttttggatttttaggaacaatatgtaacatggcccaaaaatgttaggccaagattttatttgtttactggccaaaaaaaaagcgatatagacaaatactt

SEQ ID NO: 37646 - DNA, 360 bp, Homo sapiens
gagcctcacaagaaggccatggctgggggccatgtgttcagaaatgcccactttgattacagccctgcggggttggcagttcacagggggggacacttcgacacccccgtgcagttccttcggcggctggacctctccgaactcctcactcacatccccaggcataagctgaacactttccacgtgcgcatggaagacgatgcccaagtgggccagggggaagacttgcggaagttcattctggccgcgctcagtgccagccacagaaacgtggtaaactgtgccctgtgccaccgggcgctcccggtgttcgaacagttcccactggtggatggaactttgttcctaagcccgtcgaga

SEQ ID NO: 37647 - DNA, 371 bp, Homo sapiens
  misc_feature (1)...(371): n = A,T,C or G
ggttctcacgctttggctgtctggacttttaagtttttccgctttttcacgaaggcgaccggcagcctcgggcaggggagacaggactgtatgtcacagaacagacggcgcttggacgccaggaatcctctgaagcaggagactgccctatccaggttacccttcccgaggggaaaccagggtctccttcataaagctgaggcaggccgggcgcgggggctcacgcctgtaatcccagcactttggaagacccgagcgggcggatcacctgagaagatgactcaagaccggcctctgcttgccgtgcaggaggcgctgaanaagtgcttcccccgtggtggaggagcancanggcctgtggcagagtgccc

SEQ ID NO: 37648 - DNA, 360 bp, Homo sapiens
ccggctcaaactggagctgtagcagcagggcttcatccacaccataagctgcgtgggccagttcgagaaatgggtgcaggacaacctgattgtggaggcgggagtcttcatgggcatagccctcctccagatctttggcatctgcctggcccagaacctcgcgagtgacatcaaggcaatgaaagccaactggagcttatggaacgatgactttgaaaaccactggcttacgcccaccatttccgaggtcctgtccacggtggagcctcagcagaactctctgactggggcccctggcccggccccacccagacgacatgttttctttgtgctgggtgggttataccctgagccaacctt

SEQ ID NO: 37649 - DNA, 374 bp, Homo sapiens
tttgtcggtttacaaactaagtacaggctggttgtgaagcctatgctaattaagccctcttagtactagtatccactttacattgaagacctcattcacaaatacagggtgctctgtgcttatatccttccacccttgactgccaaaaatgtgtgaaatggaaagttgatggcagcagggccgacgatgtcacctggagcctcgcgggctcagtgagttaggaagtcagcagcaggggaggcagcttgcatgcctgtcccccggcacactgtgtggaggtggaaacagagctacgccagcaggcgccaagcacccaactccagagatggaagcctggtgggcttcctttcacagagctcaactgctcgcaagcg

SEQ ID NO: 37650 - DNA, 380 bp, Homo sapiens
  misc_feature (1)...(380): n = A,T,C or G
ggtgtatgtagcagttcttaaatcagcagtattatgaaaaaaaattccccctcattagaatgtttaagaaatctttttaaaaagtaaaattctgtcagactacaaatgtttagctgttactcatttctagggaagaaattctaaatccctccttcactttgagcagggttctaattggataaatgaaggagagtagttttattctgaaggtaattaaatttacactatgtaggatgtgacagaatttttttaaaattataaaaagattttatttagtaattgggaattacttaaaataattttggaataatgctcccagacttgcccagatttgtgtattggacttattgccactggccgccactttgacttattttctn

SEQ ID NO: 37651 - DNA, 379 bp, Homo sapiens
  misc_feature (1)...(379): n = A,T,C or G
gtctcaggccagtgctgaaccataattagttttttccactcatggttgtcactgttaaaacataagaaacttatttttcaagaactttttttaaagttacagaaaaaattcatccacccatccatcccttcaatcattcattcagcactgagtgctgtgggaggaggaacactgcctgccctgctgctgcacacactcccgtgaggaaggcggtacacccctacactaagaaggcacgtgtggtggcgtccagtgctgagtggcggagaacatgaataggataaggggaggaggggagaggaggggaagcggaggcagggcaagctaggagtgcagccagggagggcctcactgaagggaagccactgagccacgaagn

SEQ ID NO: 37652 - DNA, 389 bp, Homo sapiens
caaagaagctgtcggttcaaggaagaggccttcacaagtacttgggggactacgggggcttcccaaaagagatggtattgagctgaactttgaaaggtggttgagattataataggcagaaaatggctgagaaaggcaacctgggctcagggaatggctcacccagtggttctcaaactttagtgcaaccaaaatcacctagaagactcattaaaacagtttgctgagtctcatcccacaggttccaattcaggaggtctaacaagtcccaggtgatgctgatgctgctggtctggggactattctttaagaacccctagcttaagccaaagccagcctgtccaggcaactgcatctccctttgggcactgtgttaagtgagtgaaggg

SEQ ID NO: 37653 - DNA, 274 bp, Homo sapiens
ccagggcagaggaccaacatgggcattttgtttatgagcaaggtgggtctcagaggtgatcggcgatcatagggcgatgaagttctagatccattgagacaagctctagacagtagcatgcagtcccacaacttgtaccagcatccccagcgtctggcattccatgtttctgctcctgtggcctccacggtgcaacaagctagcggtttacttggacctctgcctcatctttcttcttttgcgcttcagcctgcgcattcggtcgacgcggtcg

SEQ ID NO: 37654 - DNA, 375 bp, Homo sapiens
tgcatgcatgtttgagtaaagacctaggagtggaatgaatgggtcatatggtagatgttgcgttcaactttttaataaaccgtctgacagttttccaaagtggttgtaccgttttgcttttttttttttttttgcccccgggttggggaaaatcctgggggtttaacttttttgtaccccttggaaattttcttttttccccttttaaggggggggaaggaaatacccggggggtttaaatttggcttgctccaaaaaaaaaaatgggggatttttttttttccccccgggggccccttgttttttttttttttttaaggggcgggcgcaaattttcgcttaattttttttggaattaccacccctttttggggg

SEQ ID NO: 37655 - DNA, 372 bp, Homo sapiens
ctgggatcaagtgagcgtcccaagtagctgggactatagatgaggtctcaccagcctggccaacatggtgaaaccttgtctcgactaaaaatacaaaaatttgtattccagctactcaaggggccaaggtgggagaatcacttgaacctgggaggtggaggttacagtgagccaaaatcatgccattgcactccagtctgggtgagagagcaagacttcgtttctaaaaaaagagaaaagaatagaatgcctcagctgaaccttatcaataaaagatgtagattatttgtttgagtactttaaggaagaatttgccatttcctgggagtacactgtttccaagtgatttattgattacctatgaacagttca

SEQ ID NO: 37656 - DNA, 385 bp, Homo sapiens
  misc_feature (1)...(385): n = A,T,C or G
atgcacggttgagcctgcagaggtgaaggctatgatgagtgtggcggtggtgtacaaaaatatggctatgaggcgtgccacggtggtcttgaaccggtcaaagatgtatccagtggggaatgtcatgaagttgttcatgaaggaccccagggtgaagatgagtgagaacctctcatcctgggctttgcagtcagcctgccctgtggcattgccaatcggcccagcatctggtccacacagatccttaaagtaatcttcattcttgaagacaaacactagtgaaggccagccaaagaggacgccagcaaagcccaggcattccagcagcccagtcagcagtgtggccacgtgcatgggcaggccctggcccgccatgagcagaagn

SEQ ID NO: 37657 - DNA, 378 bp, Homo sapiens
tgaggagatgttttccttcactttagtttcaaacccaagtgagtgtgtgcacttctgcttctttagggatgccctgtacatcccacaccccaccctcccttcccttcatacccctcctcaacgttcttttactttatactttaactacctgagagttatcagagctggggttgtggaatgatcgatcatctatagcaaataggctatgttgagtacgtaggctgtgggaagatgaagatggtttggaggtgtaaaacaatgtccttcgctgaggccaaagtttccatgtaagcgggatccgttttttggaatttggttgaagacactttgatttctttaaaaaacatcttttcaatgaaatgtgttaccatttcatat

SEQ ID NO: 37658 - DNA, 366 bp, Homo sapiens
tgcttactgatcaaaaataataattacaacttttcaagacatagacagtccaatgagatatagactgaaatgacaaaaagttaaaaaggagggggataaagtgttgagtttttattagctcttttctttgctagcctgtttacgcaatcagagttaagttgccatcagtttaaaataatgggttataagagatgatttgcagtccttatggtaacctcaaataaaaaacaaaccacagataaacaaaaaataaaaagcaaaaaagtaaagtgtaccaccagagaaaaccaccttcactaataggaagacaagtagaaaggaaagaaggaagagaaaaccacataacaaccagaaaacaaatatcaa

SEQ ID NO: 37659 - DNA, 374 bp, Homo sapiens
gcttattaccacctgcttgagcaggtggctccaaaaggagatgaagaaggtgttcctgctgttgttattgacatgtcaggactgcgggagaaggatgacatccagagggcagaatgcatgctgcagcaggcggagaggctgggctgccggcagtttgtcacagccacagatgttgtccgagggaaccccaagttgaacttggcttttattgccaacctctttaacagataccctgccctgcacaaaccagagaaccaggacattgactggggggctcttgaaggtgagacgagagaagagcggacatttaggaactggatgaactccctgggtgtaaccctcgagtcaatcatttgtacagtgacttatcagat

SEQ ID NO: 37660 - DNA, 372 bp, Homo sapiens
gcttattaccacctgcttgagcaggtggctccaaaaggagatgaagaaggtgctcctgctgttgttattgacatgtcacgactgcgggagaaggatgacatccagagggcatactgcatgctgcagcaggcggagaggctgggctgccggcagtttgtcacagccacagatgttgtccgagggaaccccaagaacaacttggcttttattgccaacctctttaacagataccctgccctgcacaaaccagagaaccaggacattgactggggggctcttgaaggtgagacgagagagcagcggacatttacgaactggatgaactccctgggtgttaaccctcgagtcaatcatttgtacagcgacttatac

SEQ ID NO: 37661 - DNA, 376 bp, Homo sapiens
ctctggtcatcctgtcagccagcctgtgctccagcagcagggatatattcagcagccatcaccacagatgccagcctgttattgcactccagcctgggtgacagagcgagactctgtgtcataaataaataaataaataaataaataaataaataaagtttaaaatccataggtgtttggtatactcacaatgtcgggcagccatcaccacgatctagttccaaaacgtttccaacaccccgacaagaaactcccatacctgtcagcagttaccatttgtcctccctcctgtacccccggcaccccgtaaccattcatctattctctgcatctattctctgcctccatgcgtctcgggaatcatggattacgtgac

SEQ ID NO: 37662 - DNA, 358 bp, Homo sapiens
cgaggtctcactgtgttgtccaggctggtcttgaactcctggcctcaggtgatcatcctgcctcagcctccctcccatagttctgggattacagacgtgagccaccaaacctgaccaaaaatcataattttctatgttctctaatgataggagccgatttttataggggaagcgtgctgtggaagacaagaacattgggccattggtaaagaccatcatgacaagatgtatacagtgtactcgctgcatcaggtttgcaagtgagattgcaggagtagatgatttgggaacaacaggcagaggaaatgatatgcaagttggcacatacattgaaaagatgttcatgtctgaactgtct

SEQ ID NO: 37663 - DNA, 384 bp, Homo sapiens
  misc_feature (1)...(384): n = A,T,C or G
gcttattaccacctgcttgagcaggtggctccaaaaggagatgaagaaggtgttcctgctgttgttattgacatgtcaggactgcgggagaaggatgacatccagagggcagaatgcatgctgcagcacgcggagaggctgggctgccggcagtttgtcacagccacagatgttgtccgagggaaccccaagctgaacttggcttttattgccaacctctttaacagataccctgccctgcacaaaccagagaaccaggacattgactggggggctcttgaaggtgagacgagagaagagcggacatttaggaactggatgaactccctgggtgttaaccctcgagtcaatcatttgtacagtgacttatcagatgccctggtn

SEQ ID NO: 37664 - DNA, 377 bp, Homo sapiens
  misc_feature (1)...(377): n = A,T,C or G
gcttattaccacctgcttgagcaggtggctccaaaaggagatgaagaaggtgttcctgctgttgttattgacatgtcaggactgcgggagaaggatgacatccagagggcagaatgcatgctgcagcaggcggagaggctgggctgccggcagtttgtcacagccacagatgttgtccgagggaaccccaagttgaacttggcttttattgccaacctctttaacagataccctgccctgcacaaaccagagaaccaggacattgactggggggctcttgaaggtgagacgagagaagagcggacatttaggaactggatgaactccctgggtgttaaccctcgagtcaatcatttgtacagtgacttatcagatgn

SEQ ID NO: 37665 - DNA, 394 bp, Homo sapiens
ctgagctactgggtatagcgtgtgtgggaaggggagtcaccaaggggagtcatccccagaaggggaaggtaagatactcttccaggatcaggctcacctttcccatccttggagggggtctggggatggaaggtttttaccactttgggcatggtacacactctatcagcagaaaagggaattcatcggagattatttgggtagactgatggccttaaaggaaactgggtattatcttgttctgtcaggggaggagtttacaccttcactaacagttctgagcagatgcaacagcaggacagaccagaagtgtgacctaactcaggctgcctcagagagattgctgttggactgcctctattgatgggactcttactgagggggtccaggcatt

SEQ ID NO: 37666 - DNA, 380 bp, Homo sapiens
  misc_feature (1)...(380): n = A,T,C or G
attagatttgtagacttaaattccaaaacactcaagtatccttgacaacaaaaagcatgaccaagcacaagggcaacaatttgcttccagcacagcacacaatgaagaattccttcttaccacatggcttctgggaatgacgaataaactaggacctgacattttttaacctgtaaacaagtgtattagtgtcattcatcagtgggcaaaatcatgtgaatcacctctgtgcaattctttcaagtccagattcataacacacaaaaacgctgctgacaaggagcttttccagactcacttcattcacctcaagtcagaataggtcagaagtcaggtcatgaagctggtttaacaacctgtgttggacttgaactgttttn

SEQ ID NO: 37667 - DNA, 179 bp, Homo sapiens
cttctacagtccacttctgcttttttgttatattggttgtactgtcttcatctggtgctgctggaaaacattaaaagtagactcatttcagagttcacctttctcctgaacttgaaacagttcatcctcttccacccaagtctccttttcttcaaccccattagaggtcgacgcggccg

SEQ ID NO: 37668 - DNA, 391 bp, Homo sapiens
ccatcctgtggcagcatgtggcagtgtgcaaagaggtgaaagggccacgctgcaatcgcccgcacagtcaaccctcaacctgtagccactcaaagaagtcacagaaagcgctgggcagagaagacacctggcctctccactgctcctcaggggcctcaaggccggcaggagggaggcaggggaagagggatgggggagaagagaagaccgcacgtaacctcggaaatacacaactggctttgcttccccaggggactgagcgcaatgtgggctccagagaccttacaaccctccatgctaggaatactggccaggccctgctctgggcatgtggcctgcaactggacgaggcctggggcggcagcctttctgccatttcttcacatgcccc

SEQ ID NO: 37669 - DNA, 385 bp, Homo sapiens
attattttgaacagtatggaaaaattgaagtgattgaaatcatgactgaccgaggcagtggcaagaaaaggggctttgcctttgtaacctttgacgaccatgactccgtggataagattgtcattcagaaataccatactgtgaatggccacaactgtgaagttagaaaagccctgtcaaagcaagagatggctagtgcttcatccagccaaagaggtcgaagtggttctggaaactttggtggtggtcgtggaggtggtttcggtgggaatgacaacttcggtcgtggaggaaacttcagtggtcgtggtggctttggaggcagccgtggtggtggtggatatggtggcagtggggatggctataatggatttggtaatgatgg

SEQ ID NO: 37670 - DNA, 377 bp, Homo sapiens
atttatgtgtgtatatatacatcctgtgtgtgtatatatatatttatgtaatttaaaaaataaaaagcatgctgcttggcttggctagctaatgtgtaattgtacctggaaaacaatatttttctttgaaattctgatcatagagggattgagctctctttgctctgatgagccatcttcagaaattatgacttcttcctttctttcatcttctgaaatacataacactggccttacaatactacatggagaaaaaagccatgtgttatggagccagcctattttagccaaagaaggaaaagaccacttggatcttctagatatgaaaaagatggaaaagtctcaggggaccagcaacaacgtatcagactcttcag

SEQ ID NO: 37671 - DNA, 363 bp, Homo sapiens
gtgaaatttagggaaaataaaactacctttattacctacactatttccacctgattcatttaaaattatgtctaagattataatttgacacacatttttcaaaagagctctgagatatttttgataccacatcagatgcttctgggcactgaggagctttatcaagtaaaactttaccaggcctatgtgatgcgacatggctggtgcctgtgatgccacaggcttcccaaagccccctactgaggcccactaaggtggtgggaaccaggctgcaagctttttgcctttggtggaatagcccctctcgggttcaagtccttcctccacatttctgtccactcagcagcattcctgagggaagag

SEQ ID NO: 37672 - DNA, 388 bp, Homo sapiens
  misc_feature (1)...(388): n = A,T,C or G
tctaaacctagtttgaaatcaacagtcttgagagtagcaaagcatatgaattttacagtagaagacatatgctttgctactctaaacctagtttgaaatcaacagtcttgagaatagatgaaaattttgatgaatagtggaattcttttaaatggaaacctcttacatgtgattttccttgccatctagaaataaaccatagtatttatgttgaatcaatcaatattatattttgtttttttcctcctcttctgagactcttattgtggaaatgttagacttttatgttttcctaaatgtccctgatattctacttatttagaacatcttttcattntttccattattctgattggggaattntaatttgtctattttcaaattgctg

SEQ ID NO: 37673 - DNA, 376 bp, Homo sapiens
  misc_feature (1)...(376): n = A,T,C or G
cgcggccgcgtcgacccgcagactgcttggccagatgcggggacaggctggaatgagggaggcgtcttcatctccctgccatccccctctcacgccacccccgcccccaccgggctgcaggtgctgctgatgcgctgggatctgattgaggataaaaaggaaggagagatgacccctaccccctcatcccccagttttgaaaaggtctaagcaagtgagtctggtggaggagctgagggagggagccatggaaggtgccaaaaggaaggttggcgggggcacgtgtgggccgtggcttgggctggtcagagtggcgtgagctgcccggcgcctgccctgcccaagtgaccanggaagtgtgtgtgtgtccatgtgn

SEQ ID NO: 37674 - DNA, 390 bp, Homo sapiens
cacgaattttggtccagaacaccaaatatattactctgttatagttgattacagataacagaacagcaacatactaaaatcaatgcatattatgaaatcaagtagatgcggttcaataaattccagcttttaactattaaagcctaggtaatgcattttataatttagagaagagtacttagggatctactcagtttatatctttagacattattgtgaggctcctgcgggtcactactactatctatatccttttccagaaaatatcagcatcttaaatggtcacaaattatgtattccctctttgtcacactgaatctacagagaaaactgaaaactctacagtggcaaacaagtcaaaagatgaattctaaaagttaaggcacagat

SEQ ID NO: 37675 - DNA, 383 bp, Homo sapiens
ggaaaatagcccagagtttccgctggaatgtttctgtttactcacagaggcagaatccttgccatgcagcctctcttgtgctgtgcctgaggctagtcttcgatcctctctgtaaactgagggcttccattcactagtggctatagagcttggcagctccgttatgtgcccagctctttgcaagggcatactgggaaatgagtggagataaaggacccaatcataagcattttacagtatggataccccattttaaaaaggtaaactgaggcacaatgcaatttttttttttttttttaaggagtttatttgagcaaacagggattcatgaatcaggcagcaccaaaccaaaaggaggctttgctgaaaaaggatgagggact

SEQ ID NO: 37676 - DNA, 387 bp, Homo sapiens
tacaacctcaactcaggttaatctcagctagccatttacttcttccctgcacctaagtagctgaacatttgtggagaaaatcaagcaagccatgctgaatgactaacttcaaatttgtgagcatagatctcatctcaaaagagattaaacatctactgtttaactgttgtggctagtcaattcatattcctactctttaagagaaccattttgtacctctctcctcaaaccatctttccaccctctaactaccaccctccaataatgaccttgctacatatttcatggacaaaagtagacacagtcagataagagctaccttcagttttacttgcatatatgtccacctattccttcagatacagtagaaatgtccctcctcctaag

SEQ ID NO: 37677 - DNA, 374 bp, Homo sapiens
tgactcatggttgtgtgggctgcaaggcatggtaccaggctcagagacccatggaagaattgatgtcgcagtcctgggggcagaatcctttctcaggacacctcacgcttttctcttaaggccttcaattggttggatgaaatccacccacattatggagggggaatatgcgttactcaaagtctactgatttaaatgttaaccacgtctaaaataccttcacagcaacatctggaatagcatatgacgaaaccacttacaactatggcctgaaagttattggggattccttggtcagaggatggggtttaaggaatatagaagatatccctgggtccttctgagaattctccttggaagccaaaatggggggg

SEQ ID NO: 37678 - DNA, 374 bp, Homo sapiens
caccgcggccgtgtatacctgacgcgggggactccagacaggagaggctgccccttccccgcacccgaaccttcttgacacaccatatcctcgcccctggcttgcgcgaactcacaggatgaccaccaccctcgtgtttgccaccatcttctacttgagcgaagatttatgcaaggactaggggggcggcgcatttgcttttcagaacgacttttttttttgccttaagaaagaaccccccaaaagttagggtcttggatggcaatggggaaagggtgcagcgagatgattcttttctcctccggcatttctcccaagtttgaaggaatttggccccgtccttcccaccctttgagtttcaacagttcctggcg

SEQ ID NO: 37679 - DNA, 382 bp, Homo sapiens
ggatgatgaaaatgcctgtagtgacaccgaggccactgaagccatggcgccagacatcttaaccaggaaattagctgcagctgaaggcttggagccaaagtatcggattcaggaacaagaaagcagtggagaggaggatagtgacctctcacctgaagaacgagaagaaaagcgacaatttgaaatgaaaaggaagcttcactacaatgaaggactcaatatcaaactagccagacaattaatttcaaaagacctacatgatgatgatgacgatgaagaaatgttacagactgccgatggagaaagcatgaatacggaagaatcagatcaaggatctactcctagtgaccaacagccaaacaaattacgaagttgatagacg

SEQ ID NO: 37680 - DNA, 368 bp, Homo sapiens
  misc_feature (1)...(368): n = A,T,C or G
ataaacacagtttattctgatttataagccatcaaaataatctggagaggaattttgatggcttataaatcagaataaactgtgtttatgtcacttgatttaacggtaaacatatgaaacacgctaacagaaagtatttaattttcatatacattgtattggatactggtcttataatgctgttttctagttcttgctctacttgaaaataatcaacttcttaagcatacactgagaacatacggagtttcattaaaattttaataagcttccaaaaataggtaaatattctattctacatgactctataaataaaatgacatcaaataagagcagagccttatcctattatactccacaggcactan

SEQ ID NO: 37681 - DNA, 389 bp, Homo sapiens
cattgtgaagatgcgcatccggcacttcctccagaccttatgctggcgcagcaggaagggcagaagcatgagcatgccaccatcgtgcacgatccaccacacgtctatgtggccctccaggtagcgctcgtggttgctggggtagaaggcgatgttcttgggcacgagcagggccaggtgggcagccgtagtgcagcgcacggtgtcaatgaaggtcttccaggcacgggggtcctcgctctgtcgccagccgtagggccagcccagcaccacggagttatgccgcatgcctcccaggccacaggactggatgaggtgggccagcccctcccgcaccttgctggccaccaccacctggcagaagcccttcaccttctcaatttcccatc

SEQ ID NO: 37682 - DNA, 375 bp, Homo sapiens
gagttgcaatgcaaagctccataatgacttccctctccctcttccaaagacacagattctctgcatcatgctgcgctcctaggggaagggcgaagggtagtgtgagcaattcaaggctgtctttcccaccctcttcagtgcctcttccttgatatgatgttaaaaccaggtactgtgattgctcaccttattttctggttcttttgaaggcgctgtcttctgtggataatagttcaatttggtgttcttgaggggtgaggttggaggggacagggtgggatgatagctggagggttctgtttggccatcttgctctctttatagttattcttcattagatagaatcaccaaggcaggaaggtgtcattactgctt

SEQ ID NO: 37683 - DNA, 388 bp, Homo sapiens
  misc_feature (1)...(388): n = A,T,C or G
ctcttctgaactcccccaagtctctttctctcttgctcccggcacagcagccagaccaacgtcttaaaaacaggaagctgtctctgctggcttaaccctctgatggctcctagtgacctgaagaggaagccaaagttcccagactgacccgggcagccctaactgcctcttcttttactcttctccctcccctgcccaccattcctcttcaaccttgccaagttctctccaccttggggctctcaccccagctgcttccccnttgaagtgttcccgatcccctcagcccctcccaactgaggctcagttatgcatcagacaccctcactaaacacagaaaaaggagggtgggggccttgacaggggccctcaactgaattggtactcn

SEQ ID NO: 37684 - DNA, 373 bp, Homo sapiens
  misc_feature (1)...(373): n = A,T,C or G
gcagcagacacgccctcttagtagggacttaatgggccggtcggggagggggaggcgggatgggacacccaacactttttccatttcttcagagggaaactcagatgtccaaactaattttaacaaacgcattaagaggtttatttgggtacatggcccgcagtggcttttgccccagaaaggggaaaggaacacgcgggtagatgatttctagcaggcaggaagtcctgtgcggtgtcaccatgagcacctccagctgtactagtgccattggaataataaatttgataaggtggtgaaaaaaaaaaaaaaaaaaaaaaaagcgtccnnnntantttntgnncnntgtngtnanttccttattgtatggaag

SEQ ID NO: 37685 - DNA, 360 bp, Homo sapiens
ctccagcggacttggctgccctgcttcccgacctctccggccgcctcctcatcaactctgtcttccatgtgggcgctgagcggctccagcagatgctcttctcggactcgcccttcctccagggcttcctacagcagtgcaagttcacagacgtgacgctgagcccctggagtggggacagcaagtgccaccagcgccgggtgctgacgtacaccatccccatcagcaacccactgggccccaagagcgcctccgtggtggagacacagacgctgttccggcgcggcccccaggccggcgggtgtgtggtggactccgaggtgctgacgcagggcatcccctaccaggactacttctaca

SEQ ID NO: 37686 - DNA, 385 bp, Homo sapiens
  misc_feature (1)...(385): n = A,T,C or G
gtttggaattagatatttggtgtatgaatgaatgggctaaagtgcaaaagaacaggcagaataactgagctggtacagaggaaaaaaatcacacttaaaatctaaaagtatctgcttctcaatttgggctttcccacttagcagctttgacaccttagaaagaacacttaacttacctgagcttctattacttctaaaaagtgcataaagtgcaggctaagacatagtttttttggcaaaattcagtcagactacatcaagtaaactccctaagtctcctagtataattcatggcacaaaaactggggaaaaaacagggaggatatgattataagttcagtttgggttttttgttgagtgaatgtctccagtcatagagatgcan

SEQ ID NO: 37687 - DNA, 357 bp, Homo sapiens
  misc_feature (1)...(357): n = A,T,C or G
tttatggcttggcctcgaatacggtgtgtcctggagaatgttccatatgcacatgataagaatgtgtattttactcttgggtggagtgttctgtacacatctgtcaggtcttattggtttcgtattttctatttccttgttatcttttatttggttgttccatccattattattatttttcttgcctgataccaatgctgatatccatccatgattgaaagtggggtattgaagtctccaactttctttctttcttttttcttttctttttggagacacggtcttgctctgtctcccaggctggaaacgtggtggcatgatcatagctcactgtagcttctgtctcctgggctcacn

SEQ ID NO: 37688 - DNA, 353 bp, Homo sapiens
gtgaaatttagggaaaataaaactacctttattacctacactatttccacctgattcatttaaaattatgtctaagattataatttgacacacatttttcaaaagagctctgagatatttttcataccacatcagatgcttctgggcactgaggagttttatcaagtaaaactttaccaggcctatgtgatgtgacatggctgttgcctgtgatgccacaggcttcccaaagccccctactgaggcccactaagttggtgggaaccaggctgcaagctttttgcctttggtggaatagcccctctcgggttcaagtccttcctccacatttctgtccactcagcagcattcct

SEQ ID NO: 37689 - DNA, 388 bp, Homo sapiens
gcactcttctttattgcttctttatggatgtctttcccagatgaaaagaccctgctggggaatagttcatcgacttgttatttctttgtacacagattactccttagtaatagcaggaccttcacaccaggaaaattatttgctaaatatttcccactgtctcaccagcttgatctgtcaatttctcccagacgtaaaacatctgggctggtacagcaaaacacagaaaattcaaagagatgtccccaagatgcagaagaggacagctgtcctcaggagtctgtcacgggccagctgggggcattcatatttcccaagacccttttccagctgcatctcaccatagcttttatatgactgaaaaaatgtccaggaggttgaccagata

SEQ ID NO: 37690 - DNA, 365 bp, Homo sapiens
ggcaggtacggtggttcatgcctgagattccatcatgaaacacctcgcctggggaggggatgactgatactgttacctagcaagaaaactatgccatcacctcttttgcatgccttataaaccttagtttgtgtaaggaaaggataacgtccgtcgctctattcttggcattcctttggtgcatactatataaatgcttattatttacagtatttacaaacatatatttgtctaaggccataacagaactatctttttattaaaaaaaggagattttgctggatataccttgaccattttcttctgttattatgaatatacgtagggacactagagtataggaaactttgtatgatgttaagaga

SEQ ID NO: 37691 - DNA, 373 bp, Homo sapiens
  misc_feature (1)...(373): n = A,T,C or G
cagatcacaaggtcaggagatcaagaccatcctggctaacacggtgaaaccctgtctttactaaaaatacaaaaaattanccgggtgtggtggcgggcgcctgtaatcccgggagggactgttgtactcgggaggctgaggcaggagaatggcgtgaacccgggaggcagagcttgtagtgagctgagatagcaccgctgcactccagcctgggtgacagaatgagaccctgtctcaaaaaaaaaaaaaaaaagcccgggcccaggggctccccccggaaatctcggccttttgtcggcatttggggaggcggggggggccaaatcccctggggtcaggatttggaaaccaccctatccaccggggtgaaccc

SEQ ID NO: 37692 - DNA, 365 bp, Homo sapiens
atgagatttatttggttacagtgaataacctggacaaaatgttgagaagagttgttaaaacaagtttacattaaatatactaacaattacgtttggttacatatttgtaagtgatggttatttagaaaaactgcatagaaatccaaaccttaaatattctgcaaatcaaatcattagcttctcttctctaataaagtagggtgactagttcttggattaatctaactataacattaatgtagcacttgattatcttatggaataattctctatctcatctaagcctcacaacaaccttgtaaagtattatccccattttatggaggaagaaacaggcttagaagtggaaaggtaggttctctgct

SEQ ID NO: 37693 - DNA, 350 bp, Homo sapiens
gtctagtttccagaatataggtgaagaacttaaatctcaaccacaaaaagataacccaatttacaaatgggcaaataatttgaataaacatttttccaaagaatataagcaaatggccaatagttacatgaaaagttgcttagcattattaatcattaggaaaatgcaaatcaaaaccacaatgagataccactttttatccagtaggatggctacagtaaaaaagacaatgacaaatattgatgaggatatggagtagttgggaacctcataccttgcagatgagaaggtaaaattgtgcagccactttggaaaatagtttggcagctcctgaaaaagttaaactgagt

SEQ ID NO: 37694 - DNA, 379 bp, Homo sapiens
gtccaggttgcaggagaaacaggaagctgagactagatttggcagcttctaatacaaaatttattaaagtgaattgaattttattgtaaacaaatgacaatttatttttcatatctctgctcaatttcctcagatacttttcttgtgagagttgagcctcttaaatcactattctcagagaatagaaaattcaaatatgacaacggggtttaaactgtccatatcattaagctttgaaaagatggcaggaatctaagaaaaagatccaaatattgagaagacgtattcctttctttccatgataaaaatcacagaaaaaaaaatactgcataggcatagagttaataaaagattaggatcttgatctttcaatgagaaa

SEQ ID NO: 37695 - DNA, 371 bp, Homo sapiens
gaaagatagtgaaaatacacctgttaaaggaggaactgtagcggatctaggtaagcacctaaaatctatacactggtctgtgctttctgtcttgaatatgtcatctcctttgatagtctattcttccaaggtcttgttctgttggtcaggctggagtgcagtggtgtaatatagctcaccacagctttaaacttctgggctccagcgattttcctaccttagtcttccaagtagttcggattataggcacacaccaccatgcccagcttgatacactccttcttttcttttttttttaagacggaatctcactctgtcacccaaagcttgcagtgagccgagatcacgccactgcactccagcctgggcga

SEQ ID NO: 37696 - DNA, 372 bp, Homo sapiens
tggaactttgccaccctggagtggtggctttttaatggaggaagtttggggcactgtcttactttgagttccccgagaagcagatcttctaacaaagatttgagtgtaagtagttcaattgaaagtggatttcagggcgcactgatatagggatggagacagggaaagaaagaacacccacataaggtgtgttatcaaacaagtgaaaactgtgggagatgaaatctcaatcctgctgaggacttctggttggcagtataaaacatgtcccagaggtatcccacttaagggatgaagaaacttaggtactcatctgtcgaccccactggttgaggactgcttcccaggatataaagtctctggcacttccag

SEQ ID NO: 37697 - DNA, 133 bp, Homo sapiens
acatcctcctggagtgttcgccaggacgtggtatggcttaaccgagtaaaaaagaaaaggggagcggggcgcgggaggcagggccaggggctgggctccccacacctcacccaccccaaggacacgcagccag

SEQ ID NO: 37698 - DNA, 363 bp, Homo sapiens
gcaaaatagattaatttattttggccttgaaatggtctttctcttattaatgtgctagaatgtattcattcattcactggatgaatacttgaagagcaccttccttgtgccaggaagtactactcaaggcacagcgtgtacagcactgctcaaaacagacagctgctcctggccttgtggagcttgcattctagctggagaggcaggcagttaatacatcagtaagtcctattgatgagagagctctggaaattcctccttcccctagcctggaggctcaggccacagaatctgctaaggtctgaaggtagggtaggagaacagaggtaatgactgcagcactctgggccttgcagtgagaac

SEQ ID NO: 37699 - DNA, 370 bp, Homo sapiens
  misc_feature (1)...(370): n = A,T,C or G
aggcggatcacttgaggtcaggatttcgagatcagcctggccatggtgaaaccccatctctagtaaaactaccnaaaaaaaaaaaaaaaaagaattccccgggggggggggaagggcccggaattcccacttcctcggggggcgggggcggaaaattcctttaacccgggaaggagggggttgcatgaaccaaaaaaaaccccatggcactccacccgggtggnnaaaggggacccccatttgttttaaatcttacaagaacattatggatttttgggaaaaaggtctttttatggcttgattaaaccgaaaaaaataaaaattcttaaatgttaaacacaattgttttttgcttgccacactcttgtag

SEQ ID NO: 37700 - DNA, 360 bp, Homo sapiens
cccggatagagcctccctcaccatcctctttccacacctctagcccaggaaccagcccaggatgggccctagtgtctgcctgtctgccctcctgtctcctaccagcatgaggttcttatccctctctagctcctgcaagcgccgggccagtcgctgcccctcctccttccgggcctcctcctgcagacgcctgagttcctggctccgctccttttcctgggcggctctgcgctgaatctggcgcaaggagaccactacagagaggccaaggcacagaggaggcaggtgtgagtcaagccagaggcagccaggcaccatgaagacaggaacaaacgctgggtcaccaactctgtggcttgg

SEQ ID NO: 37701 - DNA, 366 bp, Homo sapiens
ggatctcttcgtctttgcagcgtagcccgagtcggtcagcgccggaggacctcagcagccatgtctaagccccatagtgaagccgggactgccttcattcatacccagcagctgcacgcagccatggctgacacattcctggagcacatgtgccgcctggacattgattcaccacccatcacagcccggaacactggcatcatctgtaccattggcccagcttcccgatcagtggagacgttgaaggagatgattaagtctggaatgaatgtggctcgtctgaacttctctcatggaactcatgagtaccatgcggagaccatcaagaatgtgcgcacagccacggaaagctttgcttctgacccc

SEQ ID NO: 37702 - DNA, 371 bp, Homo sapiens
gtggaggaaaaccaggcttgcgtttgaatattactttagctggaaaacactatttcattacattaatgtctgcactaattattataataatcctgagtttacaccagtaacaaatcaattgtaatgagctgaacaaaagaatctaggtggaattcttccctataaatatgctcctgtcagtgcagtcaaaacacagtgccagaacactgcctgtgtcagtgaataacacattttaaaactggtatgtccttttaatctcttaattggttgtgtatgtgggaaatcctatgaaaagtgaagtctctgtccacctggatttttgaaggatagctatacttacagctgtcacaagttgtcagtattttgaaagg

SEQ ID NO: 37703 - DNA, 370 bp, Homo sapiens
ccagctagagctggcctcatcttctctccttcctgccccatgctgagggggctggcgcctgcttttctttgtttcagcttgtcctgaagcacctgctgccatctgtaccttttcagcccatctgcatttcgaggcccacctgcggtgcctgctccccctgccgtatctcccgatcctcactgccatctgtgctgccagcattgggctctttctcctttgagaattctttgcacttcattgtactccatgctcagtgctgctcaccgtctgctttataatacaggccacggtgtgcttcgctcagcccctgaaatagatggtagtcactctgggagcaagaactgtttgatttcttttttgtgctctggca

SEQ ID NO: 37704 - DNA, 388 bp, Homo sapiens
  misc_feature (1)...(388): n = A,T,C or G
cacaaataaatggcatcttgagaatttaaaaggcaaacaaacaaacgctaatgtgcaattctaactctgaaaccactggtgccccgagagcactgcctggagaattcacccctccttgcccggcgcccgcccccggagggagggcccggtgcttagaggttaacttggtggcctaggagagggagaagccaggagaagcacttactccaaccacacgtctttccactacatcggcttgttttactaagtaggattttattttagggttcaaagaaacatgacatttattggtcaaaatattacactggntgnctattttgttattggtttattttagtttttagaaaggattaatgtacaaaaagatttagagatctgtttcttaaag

SEQ ID NO: 37705 - DNA, 355 bp, Homo sapiens
gtctaatctcactgtgctcagacttcctgtgtattaaatggggagcctgcctgcctcccccagggtggtttcccagccaagtggccacatgctttctgcataagggctgataagtgggctgccccgtggagtaagcaggctttggctcccagctagatttgaggtggaattttggacaatggaagaattttcattgtcttcttcccctgacccctggtcctaggaaagccaggccaccctgtgctaacccccctcctatggctcccttttaggttgaaccatgattccggtgacagagctccgctactttgcggacacgcagccagcataccggatcctgaagccgcggtgggaa

SEQ ID NO: 37706 - DNA, 372 bp, Homo sapiens
gtggtgcccagttccgcataacaaagggccccaaagacggagaagaggcccccgacagcccagatgaccagagagagaccaaaggaggcactgtatatgagcacacccttgggggaaacaaagatgcctgagccgatcatgttccccacaatcaggcacacgccgttaagcagtgagatctccttcttcagcttcacctgctccggccctgggctggccccatcacccaaaggggaggtttccacctcaggctgggaggccacttcatactcagtgctgtcaaccatggtggaggagaggaaacccttcaccagcttcctggcattgcctccttggtcctggatataagcaggttctcacggcagtgtgagc

SEQ ID NO: 37707 - DNA, 384 bp, Homo sapiens
  misc_feature (1)...(384): n = A,T,C or G
tgaaagtcagggtgctctgttattataactgagcaccgggaattctaaacactgtcagtgataaatactcttcccagaaaaaaaactttcttgtaattatatgtgtataattccatttttatccctaatcttttaacaaacatgtcttacatgggagttaatcccaagggctcccagctatgcacttggttccaacacgtctttgttcagccacaagaagtttatttggttcagaagcagagtgctagcttcaggcacagtttgatccagctgatgggcactgcaacctcctgcatgtaaacagcaggtttgaagtgaaccgtggtagcactatgactataaagacaaacgaggagaactngctttacttcacttcattccatg

SEQ ID NO: 37708 - DNA, 373 bp, Homo sapiens
cgcaaagcctttaattgtagctcactcttaaggaaacaccagataatccatttaggagtgcaggatataaatgtgtaagtttttgttttttaagggttttttcttagtgaattattcacccacagacatgagagaaaaaaagagggagggtgtgtggagaaaaaaatgtttacagggctaacaagggatgatgtgtcattgagtatgttactaaaaagtgtggaaatgacttgattttaaggggagggtgaggccgaaaatggaagcccatagcagatcttaatgtttcaaaggagtgcagcccttcacagccatcaaatatgagggcactgttctgtctggagctgtaaccatctcaagaacaaatcaacag

SEQ ID NO: 37709 - DNA, 376 bp, Homo sapiens
ctgggatggtcttgggcaaactaggacaagatggttttattctggtaccaaactgcagcctctgtttggagttggccaagttactactttcaaaaaagttcccagtgggtaggggttgaccagaagcttagaaaatctatgcatcagttttggtgcaatatcccgaaggtgtttgctccattcaggtgccacatacaggcctgttgcctgtctcttctcctttattgctcaggattatggatgcttactctggataaggccccagcaggcattgtgtgttatccttttgagtcctctaacctacttgcagatggggaagtgggcccaaagaggctgagtgcctggtccaagggtgcacagcttcatagtagcaaag

SEQ ID NO: 37710 - DNA, 358 bp, Homo sapiens
caaatatgtaacactgagcctatattgaaatatggattaagaggctctaactcacttttgtaaaataaaatgataggagccacatttgtgtttaattatagcatgagaaacctgagaatcaaaagaaataagtaagttccatcacacaacaggataggaaaaatagaaagtctacctcacactgctgcatttgtctgtaacttggcctactttatgaaactcaaaagcgaattaagccgggcgcggtggctcacgcctgtaatcccaagcactttgagaggctgaggcgggcggatcacgaggtcaggagatcgagaccatcctggctaacacggtgaaaccccgtctctactaaaaa

SEQ ID NO: 37711 - DNA, 385 bp, Homo sapiens
tgtcattttaaaatctgagaatatttgataaattgatgaaagaaaaattatgaagtcatagacattagaatcaagtctcttggcattatttctagttggtatatcttttatgctaaaaatattcaatattcagttgctggtcacaaataatttctcccccacaataggtattgtcttctaagaactctgaagcaatgtcagacattgagggaagctctcattgctgcaggaaaagagattatatggcatgggcggacaaaagaagaaccagctcattactgtagcatttgtgaagtggaggtttttgatctgctttttgtcactaatgagagtaattcacgaaagacctacatagtacattgccaagattgtgcacgaaaaacaa

SEQ ID NO: 37712 - DNA, 370 bp, Homo sapiens
ttttttttgaaaaaagaaaaccggcaagtttatttgtatatgccttatgagtaacctataaggttacttcaagccttaagagccaattacagtaatggttcagaaacaggaatatttgtacttactccttgggcctggacttgggagccttgtttttgtaagatgataggattttttttattgtggcatgacacagaaaagtgcaccaaatgttcagcttgatgaatgtttacagtgtgaacacagctggttagctagcactcagagcaagaaacaggatcagtacctggaagactctctcgtgccctttccagacacttccatccacttttcctctcccctaactcctccattcacctgtccccatctt

SEQ ID NO: 37713 - DNA, 385 bp, Homo sapiens
  misc_feature (1)...(385): n = A,T,C or G
gtcgacgcggncgcggttttgtgactttccaaaaagccatccatgcagcacagctttaaagcctcccgggcttgcagtgttcctggagcctgccaagtgctggatgtttaactagcatcaggagccaaagcaaacctccccttgcagcaagaggtggagtagaagcctgcctttgccccgagacatttttagaccctctgagaaccacatgacaattcagagcaacacgtaacctaaacctgcccaccacttggacaggtgggaaagagaggcccaccaagaattttccaagacctcctgttaactgatcctgggccatcaggcaggacgcatacggctgggctaaaggagcggaatgaggtgcttcctgacgcagatgtgtgcn

SEQ ID NO: 37714 - DNA, 394 bp, Homo sapiens
tttttttttaagaagaagtagctcaactttatttcagtaaaatcaccaacaaaacaataaaaagccaaaactaaaaagacagttttaattgtgagctgaagttttatatttctttacgaattccatttaaaaaagagaaatctctaaaatcatcaatacgcaggtctttaatccacttttaagtctttccccaccagcattgcagtcacgggatgcatgcttgctttgtgctcttggtaggttcggacagcttgatcatgggatttgtcaaaggcagcaagatccttgaataagggccgggtaaacttcattcttccttgttcagttgccatctttagcgccaaaggaattgcgtcctcccacttggattgaatgcagagccgcagccatctga

SEQ ID NO: 37715 - DNA, 391 bp, Homo sapiens
gccgagattgcgccattgctctccagcctaggagacggagcaagactctgtctcaaaaaaaaaaaaaaaaaaaaagggcatggatggaaaaccggggtcccttgaggagggcggcggaaataaaaaacctagggggcccgggaccaccactggggggggctgaaaaccccggggtaaaaattaaaaccattttggcaaaccacccgggggggggtcccggcaaaaattggcccccttctttttttcacagaaaaaatttggcattcggaccccaggggaaaaaccaaaatgcccggaatggcccggttggaaccggccctacaccaaatttttaccttatccacagaggccaaaaatggaaaggggccaaaactggcttttttttttatat

SEQ ID NO: 37716 - DNA, 369 bp, Homo sapiens
ctacagagtaatgaaggctgatgaatattaggcatagaggtaatggagaatttggaacaccactgctccataggaattatctactgggtgttacttagtgaaaatgaaattttacaatagagatattgtaaaaatgggtgtttgaggaggatcgtctttgaaaaattatctactgggtgttactgaaaatgaaaattttacaatacggatattgtaaaaatggagtttgaggaggagcaccttagaaactttatacaagatggggatcctgggagcaaggaaattggaaaaaaaagaattacagtaacctgggcctcagatctacatgaaaagctataatgggatgagagaaatgggagatcaagcctc

SEQ ID NO: 37717 - DNA, 365 bp, Homo sapiens
cctggacggcagcagcttcaggatgtgtctgtggtgggggccttgctggtggttgactacctgaaggtttgggagggtcttgttcacgtcttccttcccccttgctgagcttgtgttgtcagggactgtcccttcctggatgctactcagtacctttggtctaacagaggcagaagagttggattctgttgagttcatgcctttgggaacataagtggaggaagggacttcatgggtttccatgtgctcagggcgtggaaagatggctgtgccaagggaaggtgaggtggagctggagaaggacgggagtgtgccacagacgttgtctgtctccttggtccccggcttgatcaccaccaggttct

SEQ ID NO: 37718 - DNA, 371 bp, Homo sapiens
  misc_feature (1)...(371): n = A,T,C or G
ctggtcctggtccgaaatttccaccgccaccacgtgaatccccaaagccaaagttgcctcctcttccactcctagaactctgaacttcctgcatttcttgtctagacaaagcctttcttacttctgcattatgaccattgatggtatgggatttctgcaatacgattttatccacaggatcatggtcatcataagtaacaaagccaaagcctcttttctttccagactgcctatcaataattatctcaatggtatcaattcttccatattcctcaaagtaatctctaaggggatgttcctcagtatcttctttaattccgccaacaaacagcttcttcacagatacatgagcccctggttttccagattcn

SEQ ID NO: 37719 - DNA, 369 bp, Homo sapiens
agacaatcatatccaatatttttaaaggttgtaagactgtaaggaaatagccactgtcatatcatttttaaaggaatataaattatagggccttttgtttctttgggtttttttttttagaaacaaaatctctccatgttgtctaggctggactcaaacttttggactcaagcaatcctcgcaacatcattaatagctgaaagtaaagacttgagccaccacacctgactatagggcctttttgaaaggaaaatttacatcatcaaaattttaaatatattcagtctatttctcaaaaactcaaagaatactaataaatgtgtactcaggtatatgtattgtcgacgcggccgcgaattccagatctat

SEQ ID NO: 37720 - DNA, 354 bp, Homo sapiens
tctacctttactttctgatatggttttgccatgtccccacccttagcagtcatgtgaccttgggggggtttacttaccttctctgtcccaacaacttctgtaaaatctgtaacatgagattgtttctgagggttaaatgagcatagcacagtggggacactgtcaggcacacactacttgccagatgtcgagtattcatctttattgaaataggactgtggtaagccactttatggctctcgattttgtatgagaaaatcatgtttagtgccttgttagtaaaagaaagaaaatctgaaagtccctgccatggaaggaagaaatagcggggagaaaagggagttggtaagtttc

SEQ ID NO: 37721 - DNA, 379 bp, Homo sapiens
ggagaatcccttgagcctaggagttcaaaaccagcctgggcaacatggtgaaaccctatctctacgaaaaaaatacaaaaattaaccaggtatggtggtgcatacctgtagacctaactatatatgaggctgaggtgggatgatcgcttgagcccaggaggtccaggctgcagtgggttgtgatcgtgcccctacactccagcctgggcaacagagcaagactgtctcaacaaagagaacaaaaaagaaagtacagaatgtaaataaaatcctgtttcatcttttattaaattgcagagactgggatattcatattccatgtagacattatttaatatctgccagtctttgaagctcaactatttttgagtatttatag

SEQ ID NO: 37722 - DNA, 219 bp, Homo sapiens
tcctggtctaactagatcactcatctatctgttacgacattttgtatggctttagctgagtcttcatataccattttggatttttatgtcatctaacatagatttttctataaaggaaataaatttttatagaccaataaattcaacaataaatacaaggtacaaccatataaaaagaaaataatagtttacacctaaaaaaaaaagtcgacgcggccg

SEQ ID NO: 37723 - DNA, 371 bp, Homo sapiens
ttccatgcttcactcagtagcagatgctcaaaaaaatgttactggatacaagaatgtaaaagtagatatcaaatctgtgactttcaattttgttacagataccctctctttacaaatcagacatttctgtatttcactattttgtgttttattgagaagaatggctctacctaaggaacatatcagacatgtgggtgctggtcccatttgggggaaaacttcagcatatgtaatagacacagtttcacatgcacatcaggaaaacttgcacatgccctgaagttaaggcagtgtcagaaacatctaataattggtgtcctttccaacttcttggcgtcactgatgtgaatgcatcttggaaaaggccattt

SEQ ID NO: 37724 - DNA, 369 bp, Homo sapiens
  misc_feature (1)...(369): n = A,T,C or G
gggacatctgctcctggctgcaactcctgggctgaatggccagatgccagcaacccaataaggggccgtggcatttgctgcttgggatgatgatgagccatggggcccatggaccggaaatgggaccttctggctgcctagagttcaaccctttcaggagggcacctatctggccaccatacacctgccatacctgcaaggacaggtcacccctggagtttttggnataatttgtttctaatgatatgcaatgcaaggcaactgctggattttaacacactctactgttgttgtctatttgactagggcactctagagacgncgtaactctgctgattctcctgatggccgatgataactggtagagaa

SEQ ID NO: 37725 - DNA, 361 bp, Homo sapiens
cagagctggaggagttgtcctttgctgaagacactgaagagtgcaggaagcatataaatgactgggtggcagagaagactgaaggtaagatttcagaggtactggatgctgggacagtcgatcccctgacaaagctggtccttgtgaatgccatttatttcaagggaaagtggaatgagcaatttgacagaaagtacacaaggggaatgctctttaaaaccaacgaggaaaaaaagacagtgcagatgatgtttaaggaagctaagtttaaaatggggtatgcggatgaggtacacacccaggtcctggagctgccctatgtggaagaggagctgagcatggtcattctgcttcccgatga

SEQ ID NO: 37726 - DNA, 373 bp, Homo sapiens
cttaaacctatattggtcataatcactgggtgcatgaccttcgatgagtaacagccagaactactgtttcctgcatatttcaaatgaggcctatgatatattatgtaggttaaattagattccatatatgaaaacattctaaattgtaaagcacattacatatgttagctattatcaatggtaacatcgtgaagagaagagaagatgagctatatattctcacaagcccatgcttaaattttgaccttacattaaaccaaagaggatagatttttttttttatttgaaaacggttctcgctctgtcgctcaagctggagtgcagtggcgcaatctcagctcactgcaacctctgccgcccatgttcaagcgat

SEQ ID NO: 37727 - DNA, 374 bp, Homo sapiens
aatatttacaaataaacgtgtgtgtgtgtgcgtgtacacacaattcaatgaaatagatgtgaaacaagttttcttttttttttttttgaaaaaaaattttttttttgcccccagggtgggggggaattgccaaattttaatttaatggaacctttggcttccgggttaaagggaattttctggcttaaccttccgaagaggggggaataaagggccttaacacccattccaagaaaattttggggtttaaaaaaaaaaagggttttcccattttaacccgggtaattttcaaattctggacttaggggaattgccccccttaaccttccaaaggggtgggattggaggggggagaccccttcactggtttaaag

SEQ ID NO: 37728 - DNA, 392 bp, Homo sapiens
  misc_feature (1)...(392): n = A,T,C or G
cacttttaaggatgaattttaaattttgaattgcacactttatgttatttttctcacgcaaaatatttaccttacgatgataaatatattagctctttctttaattatttcggagattattcgtgttccactgtcatcagcttgtttttttctggatctgaaaaaatgctttgaaattggttgagtcagggctgcgtacggtggctcatacctgtaatcctagcactttgggaggccgaggcaggcggatcaccagaggtcaggagttcgagaccagcctggccaacatggaaaaaccccgtctctacttggattgcttganacctgagccataattcccccggctttctggcgaatgcttgattcccaccctcatgagttcttgggcctac

SEQ ID NO: 37729 - DNA, 372 bp, Homo sapiens
tttatttggggaatcaaaaacttttattcaaaataagcgttagcaaaatgaaggttggtgcctcataaatgcagggccccagagtacttataaagggattagaagataatttcacaaatatttggccgcatattaacatgaaactacaatcgctggctgttaaatatagtcaaatgcaatcaagctgaaaagaaaaggtgaaaatctacatgttatctgcccatgaggcacgaaatcgacagccccgaaaacgcaagtgctgctgtgccgccatgcccatggctatgatccaaagtgacgggcagactaccggcctgcaccaccccactcaagctgcacacaagacagccagcttaggatcttcgtgggctg

SEQ ID NO: 37730 - DNA, 380 bp, Homo sapiens
gaccgatcatgtgactaacactccttccctgcttggggggtttgaataggctgatttccagactcgaggctgtcatatagcctttttgtttttcctggtagttttctgattttttttttttaatctttaattcatagaaaacagtttacttccatccaaattaggggggaatttttttaaaccatatgtagacacaaaagagatattccttgccaactagggacacatggcagatgaaaacagagtgggagatacacttccggttcacaacagcacttctgagcagtttgtgcttaaccctttaggggagcatttgtgctcaaaaccctggaatagcaggacagtgccagggccacacagagactcagtctggaaagagg

SEQ ID NO: 37731 - DNA, 381 bp, Homo sapiens
ctcctgcctcagcctcctgagtagctgggattacaggtgtgggccactatgcccagctgatttttgtatttttagtagagatggggtttcaccatgtaggccaggctggtctcaaacttttgacctcaggcgatccacctgccctcgcctcccagtgtgctgagattacaggtgtgagccactgggctcagaccttttttccctacttcttatgagatacaaactcttttgaaataaaaacttaagataacaaagaagaaaagtaacatatatactaatttttatgcaaataacctgcatgtctttgcttcttatgaatgtacataaaccaatggagcaaaattccaaatctttaattttttcccaacaaatagatgtccc

SEQ ID NO: 37732 - DNA, 374 bp, Homo sapiens
  misc_feature (1)...(374): n = A,T,C or G
gcttattaccacctgcttgagcaggtggctccaaaaggagatgaagaaggtgttcctgctgttgttattgacatgtcaggactgcgggagaaggatgacatccagagggcagaatgcatgctgcagcaggcggagaggctgggctgccggcagtttgtcacagccacagatgttgtccgagggaaccccaagttgaacttggcttttattgccaacctctttaacagataccctgccctgcacaaaccagagaaccaggacattgactggggggctcttgaaggtgagacgagagaagagcggacatttaggaactggatgaactccctgggtgttaaccctcgagtcaatcatttgtacagtgacttatcagn

SEQ ID NO: 37733 - DNA, 371 bp, Homo sapiens
  misc_feature (1)...(371): n = A,T,C or G
cttttaatttgtgagtgtgcctcctatactacattatctctttaagattttttttttttttttgagacggagtctttgtttgccccccaggctggaatgcaggggcacgatctccgctcacggcagccttggcctcccaggttccagcgattccccgtctttactaaaaatacaaaattacccttgcgggggggcacatgcctgggaccccagctacttgggttgctgaggcatgaaaaaacctggaccctgggggggggaagtggcagttacccgaaatcaggaaaacgggccatggccctccaggggggggtacaaaacaaaacttgtgttccccatnaaaaaatggtaaaggcaagcccctagggggg

SEQ ID NO: 37734 - DNA, 385 bp, Homo sapiens
  misc_feature (1)...(385): n = A,T,C or G
gtgaaggaataagtgagagctgttggggcattcaggtgagaagcgacttggcacactgttgttttcaacccgttcttcaagactgtagacaaacatgagctccagtggcttcttagcactttgcttgtaccaatacatagcgttatgacccagatgttgttcacatttcaaagacttcttatttgtcattcccatgaccaggtgtcttggtgtctgcgtaactcccgtttccatggggaccgctcccaggagacagagaaccgcacagcagagcagcctgcagcccatgctagcctcgggtctgagatggggcctctgactggggtcctctgggtgaggtgctgggctctggtctccttggccttggttggtgttnttccgtcga

SEQ ID NO: 37735 - DNA, 377 bp, Homo sapiens
ggggcctgtaatcccagctactcgggaggctgaggcaggagaattgcttgaacccaggaggcagaggtggcagtgaaccgagatcacgccattgcactctagcctggacaacaagcgaaactccatcccaaaaaaaaaaaaaaaggaacccggcccaaaaggggttaagaggaagggtttttatggattctttacccgggggggcctatttttaaaaccccacaaaggggtgggaaaaatcccaggggtaaaaaaccacatgggagctagccccctttttgggagtccacacccccaaaatcccttaaataaccggaggcatatttcgggaaaaagttttaaaaattttgtaatcattgccgaactaaataattact

SEQ ID NO: 37736 - DNA, 377 bp, Homo sapiens
ctcagttgagggcaggacttttttgtgggagaggacgcctagctttcagtcctaaaggaagtgatttccctggtaaagggaaggtgattttgccaaggctggagtctaaaggaagatggaactgtctttcaggcgtctccagcagaccctctacagacccgtgttcctgaaggcagagtcctgaaggcagaatacccctgtggcagtggcacagctcagagtgtcccatagacactgattttggccacggagatgctctctgtgtagtggttccggcctttctcatacaggacgtagagctggggggcctgctcctctccatccatgctgccctccagggttgccagggatgaatagccactggggcctggccatag

SEQ ID NO: 37737 - DNA, 387 bp, Homo sapiens
ggggagcttctgagccaggagaaggaaattcacagggttaatcactcagttaaggtggggcaggaacaaatcacaatggtggaatgtcatcagttaatgcggggcagggccttttcacttttgtgattcttcagttacttcaggccatctgggtgtatacgtgcaagtcacaggagatgcgatggcttggcttgggctcagaggcctgacattcctgccttatgttaataagaaaaataaaatagtgtcgaagtgttggggtggcgaaaatttttggggggtggtatgaagagaaaatgggcgatgtttctcagggctgcttcaagcgggattaggggcggcgtgggaacctagagtgggagagattaagctgaagggagatcttgt

SEQ ID NO: 37738 - DNA, 386 bp, Homo sapiens
attttattagatttctcttatttgattgaactagaccccttccaagaacaaatcgcaggtaaaaagtcactaatattagaaagaaacacgtggagatattctccatgggaagcatctgaggtccctgcctctggggaactgtgtggggagcaggcattgctcgctgagcacctgctgcctgggctccgtgctggactctgcatggggacaccaggacagagaagatgtcaccgctggccgcaaaggcatctctggacttctgagtcagaaacaacatacgcacaagtcactctaatagaaggcaggatctccaaggcatctcgggtgagatctagaggggagggaggggttgtacttggttgcaggaatcacggggtcttcaggaa

SEQ ID NO: 37739 - DNA, 372 bp, Homo sapiens
ttttttttttgcagtgaagtcacaataatctttaactgggaaatttatttaaaattcctgatctgttcttattaaaactgtgggggaaacaaatgttttacgtaagtgctacatttccagtaaattgcacctggcatcaaaagctcagcttcatcttagggtcctgcttgatattacaaaagactaattttaagtcctaggactcaaaataaacatgattttttgaataatagatttatacctcaaaaatacatctaaaaaggcattggttagtgctattaaaaagctctatgtgctcgggtacattttttttcttacaggcaaaagccaggggaaacatttttgttcaatttctaggaattttctcttggg

SEQ ID NO: 37740 - DNA, 372 bp, Homo sapiens
  misc_feature (1)...(372): n = A,T,C or G
ctcatgcctgtaatcccagcatttttgtagagatggagtctcacttggcttccaaagctgggctcaaactcctggcttcaagtgatcctcctaatccacctcccaaaatgctgggattacaggcatgagccactctgcctggcccttaattggggaattaattattgatatgaatgggaacctaccatcttgctctttgtttcatattgggcccatctgctctggttgcttttcctgtttagnttaatgttctgccatctttcggattatttaaagatatttatcccaacttttttgggggtttttttcttttttttaaaaacagattccacatgtgggcccaaaacaaaaggggggggacttttttccccn

SEQ ID NO: 37741 - DNA, 372 bp, Homo sapiens
  misc_feature (1)...(372): n = A,T,C or G
cttggtttggagggatctccaagctggttgcctaggaatcttaatgcccgttttcttaaagatgtggctaattatgaaaaggtgaccattgtcttctgagtagaccagagaggtaaacacttcagaagtagccgtggaaccagggaagaatgtggcctaggagtgagtgaggagccaggagaatgctagcagaggattcggatcaaaggagctgttctgtaggttttcttatggtgtgggactgtgggaagtgctgtgtgtgtgtgtgtatgtatgtgtgtaatggtggntgttgngcgananacananaaagagagagaattctttcaagtgaatctaaaagcttttgcttttcctttgtttttatgaaga

SEQ ID NO: 37742 - DNA, 374 bp, Homo sapiens
ctgaaacaacatcggatagttcccccaccttaagccggagaccacttcgagggggctgggcccccacctcctggggtcgaggtcaggacagtgacagcattagcagctcttcttcggactccctgggctcctcatcctccagtggaagtcgccgggccagtgccagtggaggagcccgggcgaagactgttgaagttggcaggtacaagggccgccgccccgagagtcatgcccctcatgtacccaatcagccatcagaggcagctgcacacttctacttcgagctggcgaagacagtgctgatcaaggcagggggcaacagcagcacttccattttcacacatccatcttcctcagggggccaccagggtccc

SEQ ID NO: 37743 - DNA, 325 bp, Homo sapiens
gtgtgtttgtgcgtgtgtgagaatgtgtgtgtgtgcatataactgtatatacataaatacactcttctagaggggtatatacatatgcacattacatacattttaatttatcgactcaaataaccaaattaagatttggagatgtgggatgatcttgatttaaaacagcatgttagaaaccatacacgttgagtctaaaattatcgtggagcacatggatgttgcccatattaagctatttgctgtttgaattatagaggtctacagtatttgcggcggcatacgtttttgtaaaaaaaagattaaaaaatagtcgacgcggccg

SEQ ID NO: 37744 - DNA, 367 bp, Homo sapiens
ttttttttcaaaaaaagtttgacatatatttaattcacatacaagcaggaagattaacttcataagagaattaacaaaagttgtattaattcaagacaagagactgcagagactaaaattgcttagtactgaaacttttgcttatataaactgtagtttatggagaaaataaagaatttttttgttttttttgaggcaggatctcactctattccccaggctagagtgcgatggcaccatctcggctgactgcaacctccattttccaggaaggctctttaattccccctgattacaaaggatttgtgtgaacataatttggcgaatacaagaaaatttacaccacaggagacaaacatactcttgg

SEQ ID NO: 37745 - DNA, 391 bp, Homo sapiens
aaaaagcactccggcctagactgccatgtcatgctgttcatgagacttgagggctccaaattggctgacactcttctttcccccatgttcattttactacgaaactggaagcttttccttcaccacaaggccacttgtcacctacttttttgtacactcacttccagcaaactagttccaacccaggccacagccttcagcttccttcttcctgcatatgacaccagcttagctttccagacttccttctgtcatttcacccttcagccctcaatggttcacacacatgatcaaatctggatgcctaagtcttcctaggaccttcttgctgcctcatttgacaagcttcagtgctgcctttgagcctccctgcctccatggacctcccttt

SEQ ID NO: 37746 - DNA, 309 bp, Homo sapiens
attttttaaaatatttcaaaataagttgttgagctggcaagaaagtaaagtttcacaggggccataaaaaatgagaatgagactctcacaccaggtagaatggcgatcattaaaaagtcaggaaacaatacaatgctggagaggatgtggagatatacgaatgcttttacactgttggtgggagtgtatattagttcaaccattgtggaagacagtgtgtcgattcctcaaggatctagaaccagaaataccatttgacctagcaatcccattactgggattctactataaagacagtcgacgcgtgcg

SEQ ID NO: 37747 - DNA, 391 bp, Homo sapiens
  misc_feature (1)...(391): n = A,T,C or G
aaaaaaatgaaaaagaataagtcacattggttccatggccacaaaccattcagatcagccacttgctgaccctggttcttaaggacacatgacattagtccaatctttcaaaatcttgtcttagggcttgtgaggaatcagaactaacccaggactcagtcctgcttcttttgcctcgagtgattttcctctgtttttcactaaataagcaaatgaaaactctctccattaccttctgctttctctttgtccacttacgcagtaggtgactggcatgtgccacagagcaggccctgcctcactgtctgctggtcagttctgggttcacttaatggctttgtgaatgtaaataaggggcaggtcttggccctagaggattgagatgtttttn

SEQ ID NO: 37748 - DNA, 393 bp, Homo sapiens
gtgggtataagaagtgtggggagtggggagtcagggattcctttgtggaggaaagggctgggggatggtgaggattttagactccatctctataaaaataaataaataaataaataaaaataaaaaataaagaccatagcatgcttactgtcagattggttttttaattctctcctgattctcataggaggataaagatcagagaatcagtctgaactctgttttggctttgagctttcatggttgttttggatgatacccacaggatacatgttatcccttggtgggcccgaattgctcttgctgcctcagatgacttagccacatggacatgaaggccctgattcatcactccccacctgagccagggcactcgccaggcagcgggcactg

SEQ ID NO: 37749 - DNA, 379 bp, Homo sapiens
cactccctcgctggcctgaacagctgtttacaacggaatccggacgccgggcgcgagtggagctcagtgccagaggaggggattcccggcgccgggggacagagccccttttttttttttttgccaaaaaaccttttttgtgggggacccttttgtgtccaccttagccccgggggcagccccaaggattattgttttttttggaagggggggggaccctccccccttgggttttttttttaaacacaggggggtttaatggattccgcccaatataaccaattaaaggggttggggggcgattcttaaacccttttattaaaggtccccttttgaaaagggctggcggagcaaaatccttgttttattttccccccaa

SEQ ID NO: 37750 - DNA, 384 bp, Homo sapiens
tacggcaaaatgctttgcatgaggcatacttatgggacgcacttacgttgcctgtgacagcacactgccatttgcaacttcattattttttctttcttgcggctgtacttaataggaattaaatgtgtgaaaataaataataccagtaaagttagctataaagaatgaacattctgtagcattctttggctaacaaccacattcttcagcatctaccaaagaaaactcgcatgatacactaaatttaaaacgctgtgaaattatacattactctctaaaaataattgatgtccaatgattaagaaacattacaaatcacacccgaagtagcaatagtagcatactatgctctagaagactataagttactgttaaaaacagtgg

SEQ ID NO: 37751 - DNA, 191 bp, Homo sapiens
ccaaaagggtcatcatctctgcaaatgagccccagccttctccatggtggtgaagacgccagtggactccacgacgtactcagcgccagcatcgccccacttgattttggagggatctcgctcctggaagatggtgatgggatttccattgatgacaagcttcccgttctcagccttggtcgacgcggccg

SEQ ID NO: 37752 - DNA, 390 bp, Homo sapiens
  misc_feature (1)...(390): n = A,T,C or G
gtcattctcattgtcacccttctctatatctcccaggccctcagtgtcgagcagaactagggtgtgttctggcttcttgggatgaggcacacaccacatccagattcccttggtgtgagacttcactgtggagcctagagagaagccgtttttcttcccagccagcttgttcatcaggtaggatttgcctgtgcgatagaggcccacaatcgccaccaccaccacaggctgcgtaattgcagataggatcttcagagcttctggattcaccaccagctgccctttagtgttatcaatgaggctcattgggcccggcaagttgatctctggagccatgtccagggtgttgttccccagatcagagatcctttagcactggnaaagagggtg

SEQ ID NO: 37753 - DNA, 365 bp, Homo sapiens
cccgctccaccgccctttgttgagccccatcagctgcccccttttactttgcattgaacggcctgtccaaagatcctctctctagggcagcagagagctttttgcactttaaaaaaaaaaagaaagaaagaagggtcggaatttcttttgggtcaatatttttaagggtgggaggagatgctcagtagcagcagcctatggcaagagcttataaatgattgatgcaaatttgcactctgctccccctctgtaaggatactgatagcacaacctcttccccccaccccgccccgccttttggtcgccatccctgtccctttctggccctcttcctgtagcccagtctcaggctttcctcttcctga

SEQ ID NO: 37754 - DNA, 375 bp, Homo sapiens
  misc_feature (1)...(375): n = A,T,C or G
cttgaactccttgcctcaagcaagcctcctgccttggcctccccaagtgctgaaattacaggtataagccactgcacccaactaaacacgtaagtattaaaagagaaactgtatctctaccaccacttaaaatcagctttgctccatggtgggttggtatgtggcccatgctgggggccacagacagtacacccctctctcctctgctattgaacagatgcaaaacctcaggcctgagcccaagcaccaccccttagctttacaaacgtgcagatctctggatgcagatactccaggagtgtggcctcggcaggtctgggtggagccctgattccatgttgtgaacacgcctccttgagagcaancgatgtgcan

SEQ ID NO: 37755 - DNA, 201 bp, Homo sapiens
ggcgaggcctttatatccttggtcacttgatagtagaagctggaacaaaatggtgctctttagctaaggcaatttacagagggctgacagctgagagcacttgtagaatctaggaaaatgagtctttcattcttgaaggggaatcttcacatcatccactacaaatggtgctatattttggaaccagcgtcgacgcggccg

SEQ ID NO: 37756 - DNA, 394 bp, Homo sapiens
ctatgtttctcaggctggtcttgaactcctggtctcaagtgatccttctgccttggcctcccaaagtgctggaattataggcatgagccactgagcctggcctgattatctgttttttgaatagtgaccctaatgtgcttttccagttccagtaacttttgataaaatttttcagcagtgtcttcatctaggtccatcttctgggtcataatataatttcttccaaagccagtggtggcactcagatatttgatcagaggattgagagattcaggcttttggtggaaaagccataccagagcttctgttccattatatggtgtcaaagtgaatgcatttgcaaaaaagcgaagtagcaatattgccggcatcaacagcgtccatataaacggaa

SEQ ID NO: 37757 - DNA, 386 bp, Homo sapiens
cgcggccgcgtcgaccagtgtgcgcttggcacaaacactggtctcgaacttcaggccgttcctggcgacatactcggccagcttgtcaatcacgggctggacgtcggggggcggggggatgatggcggccacgggggcaagtgcacttgtggtggtggttgtggaggtggccccgctgctagtctctgctgtggttgggggcggcggtggtgtggtcccaggaggtcaggagttcgagaccagcttggctaatgtggtgaaaccccgtctaatttgtaaaaatagaaaaattagccaggtgtggtggtgcacacctgtaatcccagctacttaggaggctgaggtaggaggatcacttgagcctgggaggcggagattgcagtgag

SEQ ID NO: 37758 - DNA, 372 bp, Homo sapiens
ggctatatctctattctggcaataaaagtactctggacactgttaaggtgagaaaagaaaagaaatcggggctcccaggaggagaatcctgaaccacgggctctgcggagatgtggccttcctctttagattttgtgccttttatgtgggcagagggaaaaagagacagccagcagtgatcattaatcctgaaaatgccgagggctttggcctgggacccacaccaagacagagtcaaaccgagttcttctagtgttgagcgagttgcacatcttccgttggagtttgctgtggatgctcattaaacagacatgggcagaatcccacttgttgctcgtccttttccacctcacctccatcattgtggctgag

SEQ ID NO: 37759 - DNA, 372 bp, Homo sapiens
cctcagtcacacagcaagtgaggcagagcccattacacgcctcaaatgttggagctctcttccctgtatcattccatctataggctatatttatagcttgattttttttttctcattatgaaagtaagacatgatgattttagagcactcaaaaaatcctggaatgtatacaaaaaaaaatcttattagggggtaatctaaatataaattttggtatcaataagatatataaactccatgcatagaggtccaagaaaatttataaatttagttctttgtattttttaaccactgaaaaattttttgggatttttttttttccgggaaacaaagtttcgcccttgtcacccaggctggagtgcaagggtgcaa

SEQ ID NO: 37760 - DNA, 386 bp, Homo sapiens
gaggttatgagttctgggcagcagggctctgatgttggcccaatcggtgccttgcgtctgggccccgacaaggcaggcgggagagccccgaagcctccaggcagcaggagacagaagagaggacacagcattccaccattcaggagcagccagaagctctgacggaacagacttggggggagatgggaaaagcaggtttggacgcttccactcgagccagacgctgctttgtccccagggttagctgaacacggtgttgtgctgctgggtcacccggatgaatgttgccctcctgctgagctccttgagtttggcggcccccacgtaggtgcacgtggacctcagtcccccgagaatatccaggatagtgtttccacatctccttt

SEQ ID NO: 37761 - DNA, 390 bp, Homo sapiens
aaaaagcactccggcctagactgccatgtcatgctgttcatgagacttgagggctccaaattggctgacactcttctttcccccatgttcattttactacgaaactggaagtttttccttcaccacaaggccacttgtcacctacttttttgtacactcacttccagcaaactagttccaacccaggccacagccttcagcttccttcttcctgcatatgacaccagcttagctttccagacttccttctgtcatttcacccttcagccctcaatggttcacacacatgatcaaatctggatgcctaagtcttcctaggaccttcttgctgcctcatttgacaagcttcagtgctgcctttgagcctccctgcctccatggacctccctt

SEQ ID NO: 37762 - DNA, 380 bp, Homo sapiens
  misc_feature (1)...(380): n = A,T,C or G
ctgagacatacaggacagagcatggctcgcctacagactgcactcctggttgtcctcgtcctccttgctgtggcgcttcaagcaactgaggcaggcccctacggcgccaacatggaagacagcgtctgctgccgtgattacgtacgttaccgtctgcccctgcgcgtggtgaaacacttctactggacctcatactcctgcccgaggcctggcgtggtgttgctaaccttcacggataaggagatctgtgccgatcccagagagccctgggtgaagatgattctcaataagctgagccaatgaagagcctactctgatgaccgtggccttggctcctccaggaaggctcaggagccctacctccctgccattatagctgn

SEQ ID NO: 37763 - DNA, 383 bp, Homo sapiens
ggagggatagcattgggagatatacctaatgctagatgacgagttagtgggtgcagcgcaccagcatggcacatgtatacatatgtaactaacctgcacaatgtgcacatgtaccctaaaacttaaagtataaaaagtaaaataaaataaaataaagcaaaacaaaactatcaaatctattcagggaagggatctaggcaaatgcagaatgtttttcctggcagtatctaagatttcaatctcctcattctcccagtgaggaaactggtgtcagagagcaaaagatactcactcaaggtcactttaactactggtagaacaagaacagggcttctgtctgggtttattttccctctgttctgataggggttgtgaccttcagt

SEQ ID NO: 37764 - DNA, 372 bp, Homo sapiens
  misc_feature (1)...(372): n = A,T,C or G
ggcataatgagtctgaagggcagtcctccttctctaggttacatgaggcaggaataagaagtcagacagagacagcaagacagttaacaatgtaggtaaagaaatagggtgtggtcactctcaattcactggcaaatgcctgaatggtctgtctgaaggaagcaacagagaagtggggaatccagtctgctaggcaggaaagatgcctctaagttcttgtctctggccagaggtgtggtatagaaccagaaacccatatcaagggtgactaagcccggcttctggtatgagaaattaaacttgtatacaaaatggttgccaaggcaacataaaattataagaattcactataccttcccctccctggaactn

SEQ ID NO: 37765 - DNA, 170 bp, Homo sapiens
tgggggattcgtttagagaaaagaaccaggttgttggctaagaccagctggctgagaatcaggtctctgggtctcaatatcatggcatccagccctggagatgcttcaggaaagttgcaggtccatgctgcaggacaggctcagatcagcagagacggtcgacgcggccg

SEQ ID NO: 37766 - DNA, 395 bp, Homo sapiens
tgagatcgcaccgttgcactccagcttgggaaacaagagcgaaactgtcttaaaaaaaaaaaaaaaattacctgggcatgggggcatgcccctgtagtcccacctacttgggaggctgaggcacgaaaatcacttgaacttgggaggaggaggtcacagggagccgagattgccccacggcactttagcctggacaacaaagcaagactttgtttcaaaaaaaaaaaaaagaaaaatccccccttttttaaaaaaagccttgggccttttttaaacaactttggcttttccaagggccttttaaaaaaaaaatttgggggcggccccgggggttttttcctcccccccgccccaaattcccaattttataattggaaaaaccggaaaaccccccc

SEQ ID NO: 37767 - DNA, 381 bp, Homo sapiens
tgagatcgcaccgttgcactccagcttgggaaacaagagcgaaactgtcttaaaaaaaaaaaaaaaattaactgggcatggcggcatgcccctgtagtcccagctacttgggaggctgaggcacgaaaatcacttgaacttgggaggaggaggtcacagggagccgagattgcgccacggcacttcagcctggacgacagagcaagactttgtctcaaaaaaaaaaaaaaaaaaaatccccccctttttaaaaaaaaccttgggcctttttaaaacacctttggcttttccaaaggacttttaaaaaaaaaacttgggggcgggcccgggggttttttccttcaccccgcccggaattcccaaatttataaacggaaaaac

SEQ ID NO: 37768 - DNA, 371 bp, Homo sapiens
  misc_feature (1)...(371): n = A,T,C or G
ctcatttcaaaatataaattcaaaacactaaaaatcccaatacagtgcagtttggaagaaactaaaactaaaagatgacactgagaccaggcacacaaatctttagctcgtaaatataatacaggttattgaatcagctttgggagtttgtggagaaaaaaatctgaaggccttgtagtgccagtggagcccgattttcagaacaagctagctgtgatttttgccactttagaactcttgtagctactcgactttctgggaagaacccagacatgggatgtttaaatcaccaggtgggggaaaaagcactgatagaaccaattgttgaagaagccagtaccatttatagtagtgaatctagatgagaggtn

SEQ ID NO: 37769 - DNA, 373 bp, Homo sapiens
cacgcctataatcccagcactttgggaggccgaggcgggcagatcacctgaggttgggagttcgagaccagcctgaccaacatggagaaaccctgtctctactaaaaatacaaaattagccaggcatggtggcacatgcctgtaaccccagctacacgggaggctgaggcaggagaatcgcttgaacccaagaggcggacattgtggtgagccaagatcacaccattgcactccagcctgggcaacaagagtgaaactccatctcaaaataataataataataataataataataataataataataacaactttctctttcaggcagagatgaagaagcatgatcctcatctaagaagttaatcctctcagc

SEQ ID NO: 37770 - DNA, 387 bp, Homo sapiens
cggaggttgaggtgagccggagatcgtgccattccagcctgggcaacaagagcgaaactccgtctcaaaaaaaaaaaaaaaaaaagggccgggggttttttggaccattaaagggaaacctttgtttgggcccaaaaaaagggttataaccggggtccccttttctttggggaaaaaacacttgggaaaaaaaaatggcttttgtgggggtttggggggtgggaaaatccctttttttgggttgggaaaaattcgaaataccctcgggcccccgaaaccaaccgggggaaaaagctgcaaaaattgggggccactcattttttttttttttaaaaaaaaaaaaaaattgtggataaaaacagggtcctgcttatgcccacgggctgt

SEQ ID NO: 37771 - DNA, 369 bp, Homo sapiens
gcgcgaggcacagttccgaggactcggacatcaccagtctcatagaagccatggacaaagacttcgaccaccatgactccccagccctagaagtgtttacagagcagcctccatcgccattgccaaaaagcaaaggtaatcatctcccactgccggagatccgtgatgtgtgagggaaaagccagtgcgtgcttaaggagctattaagattatagttgtggtaaacaactaattcagtaggttcctctggctcagatttatctccagtgttggacttcaacttttccataaaaatgcaattagaggtatctgtcataaaagatatatttggatttcttagattgtttaccaaaatcagaaattctgtgg

SEQ ID NO: 37772 - DNA, 363 bp, Homo sapiens
  misc_feature (1)...(363): n = A,T,C or G
ccttgataaattattctggatttaatgttattcaagttcatctaagcagcagcaagaaaaaagagcgaagatatgaccctaaaaatattttcaatttagattgtcttatagacaagagtatcaggccccagtctctgacagaaacaaatcttaaacataatttgttcatctgacacatgtatattaaaaacacctattgtgtccacagggtagggatgggagaatggggggtgtacaaacagaacaccagccaacaaaaagacgcaaactaacagctctggctttaagttaagggcttttgctatacagctgaagagacaaaacacacacacaaagtggaatggggccagacaatagaaaatn

SEQ ID NO: 37773 - DNA, 308 bp, Homo sapiens
attttttaaaatatttcaaaataagtagatgagctggcaagaaagtaaaggtgcacaggggccataaaaaatgagaatgagactctcacaccagttagaatggcgatcattaaaaagtcaggaaacaatacatgctggttaggatgaggagaaataggaatgcttttacactgttggtgggagagtaaattagttcaaccattgtggaagacagtgcggcgattactcaaggatctagaaccacaaataccatttgacctagcaatcccattactgggattctactataaagacagtcgacgcggccg

SEQ ID NO: 37774 - DNA, 308 bp, Homo sapiens; identical to SEQ ID NO: 37554

SEQ ID NO: 37775 - DNA, 370 bp, Homo sapiens
tttaaatcttaattaattgccctaatggaaaaaaaaattcataggctgcacaggtgcttgtcctatttctctccccttcattttgttcctctcctttcctctttacttcttccttttttcttggctaatttttctgacaattgtttggtggtggtattttcaatagaaaagcggaccaaaggagtcaagtgagaagaaataaaggtcctggatagtttagaaaccaagtaatcaataccaaaataatcaataaccaagacatggctgtattataagaattagatataaatataaaaacatatttcattattattaaaataattcattttaagtacgaatgtaatcctatggctgtaagaaagaaacagaa

SEQ ID NO: 37776 - DNA, 385 bp, Homo sapiens
  misc_feature (1)...(385): n = A,T,C or G
gaacaggtaaagaacaagcacctttggagatgagtatgcatccagcggcaagcgctccactctcagtctttactaaggaatctacagcctccaaacacagtgaccaccatcaccaccatcaccatgagcacaagaaaaagaagaagaagcataaacataagcacaaacacaagcataagcatgacagtaaagaaaaggacaaggagcctttcactttctccagccctgccagnggcaggactattcgttctccttccctttcagactgagaaggggacaaaaagacctttcctttcatgtccagaagaatgtatgtaactaaagctttgtcctctgtgaagaattataaaagggaggggggaaaggattcgcctctcctacagaa

SEQ ID NO: 37777 - DNA, 119 bp, Homo sapiens
  misc_feature (1)...(119): n = A,T,C or G
catnagtggaaaacaattgaggacttgtttttctcttgcttcgttcccttcttttaatcaatgcagatagcctgccagactccccaggtttgtggtaagatctccgcagcattttaggc

SEQ ID NO: 37778 - DNA, 369 bp, Homo sapiens
gaaaagactctactatcgggagaagaaatataaatatgtggaagattacgagcagggtcttgctagtgagctggaccagtgaggcctaccccacacctgggctctccacagccccatcaaagaacagagaggaggaggagggagaaatggccaccacatcaccccagagaaatttctggaatctgattgagtctccactccacaagcactcagggttccccagcagctcctgtgtgttgtgtgcaggatctggttgcccactcggcccaggaggtcagcagtctggtcttggctgggtcaactctgcttttcccgcaacctggggttgtcgggggagcgcttggccgacgcaatggcacttgtgtggct

SEQ ID NO: 37779 - DNA, 394 bp, Homo sapiens
cctaaactcaagttttaaaagaggaaactaaggctcaaagaagcttactgacttgtcctgattaatgcacctactaggtgctatggttttaagattcaaatcctggtcttctaagtctgaaatctctgtactgttttccagtgtgatgagctatcccatgggaccttaggaactactgtgctggggtccaaaaatggctcagtgaactaaagccacttccaccttttatttgtagtttgatccaaatacagtgaacagcaggaaaggaaaagtctggatggtctgaaaaagtctgggaaaagtgctgggaggctacattttgcttcagggctgagctgggacgtcagcatagcctcaggaagactgaggctgtggagctgaagggctccagcac

SEQ ID NO: 37780 - DNA, 394 bp, Homo sapiens
  misc_feature (1)...(394): n = A,T,C or G
gttcccttatttcttccacactgttttttatattggtacttataaacaaggcaatttatgatatgattacttttctggatcttcagaaaatatttgttcatttattttacttacttgtttatttatttgagacggagtttcgcttttgttacccaggctggagtgcaatggtgtgatcttggctcaccgcaacctctgcctcctgggttcaagtgattctcctgcctcagcctcccaagtagctgggattacaggcatgcaccaccaccatgccccactaattttgtatttttagtggagatggggtttttccatgttgatcaggctggtctcgaactcctgacctcgggtgatccacctgcctcggcctcccaaagtgctgattacaggcatn

SEQ ID NO: 37781 - DNA, 383 bp, Homo sapiens
  misc_feature (1)...(383): n = A,T,C or G
ttttttttggtcagcaatgtctttttaatacagatgtggtacagaatgtttaattacagcagggcagtgattccagttaaataaaattaaaaacctttattttcccaaatataaaattactaaattaaagtcttaaaagaaaatataacatggtgacagctttaaagtacaccaccattcaccacaggatttatgatttaccaattacatactccaccattttggcaaaaggatgaaattcttaaaactgtttataaacctaatatagtaaagactgtatacatctccatattgcacatttttatgtacaagaataaaacattaaagtgtattgcatatactggaacagcacaaatttatcacaattaaacntaatgcataag

SEQ ID NO: 37782 - DNA, 371 bp, Homo sapiens
  misc_feature (1)...(371): n = A,T,C or G
cacaaactgtaaggaatgttacacacatggtaattattactaataattcagcaaatggtatttgaccacagacttcctgcctaggcaccagggaaagaggggaaagaacacgacatgtgaatacacagctgtccctagggctcctggagttctcgcggtgccccaggtgccatgcatgactttaaagatgggagtggggatgcaggatgccagacatgtggcccttgggtgggaattgggaccccagatctttaatcacttaagccttgggaggtgtaaaagtgttttcccattccacagagggtacaaaaggatacagggcacattgcacggcccccagggcaaatgcagtgtggtgctctttcatttan

SEQ ID NO: 37783 - DNA, 370 bp, Homo sapiens
gcctgaccattacagaaaagacttctaaatcattgaagacttcatggaggaaaagagattgaatgcgtcggcaatttttatcattcctggtactttgaacaatagtgtatgtaagtgcaaaataaaagaaaaagctgctgatcattgtggcgagaggaatgtaaaatatcagtatttttcttgctgctaggtttagttatattgggctgcttattcttaattctagtgctaacaaatttgatttcaaaagcacatctgtggtcaaccaacttcattgataatatttgttttattcatattaagcgaccctggaagaatattcatgttacgtggactgcagattttataaaaaggagaggatgcaccaatt

SEQ ID NO: 37784 - DNA, 365 bp, Homo sapiens
ctctgctgatgcccccatgttcgatatgggtgtgaaccatgagaagtatgacaacagcctcaatatcatcacgtgatgaaggcagggcccgtggagaagcggccagcctggcaccctatggacacgctcccctgacttgcgccccgctccctctttctttgcagcaatgcctcctgcaccaccaactgcttagaacccctggccaaggtcatccatgacaactttggtatcgtggaaggactcatggtatgagagctggggaatggaactgaggctcccacctttatcatccaagactggctcctccctgccggagctgcgtgcaaccctgtgtatggggttctggggactggcttatccatact

SEQ ID NO: 37785 - DNA, 387 bp, Homo sapiens
  misc_feature (1)...(387): n = A,T,C or G
cgatgaccctgtcgccacttctgctgttcctgccaccgctgctgctgctgctggacgtccccacggcggcggtgcaggcgtcccctctgcaagcgttagacttctttgggaatgggccaccagttaactacaagacaggcaatctatacctgcgggggcccctgaagaagtccaatgcaccgcttgtcaatgtgaccctctactatgaagcactgtgcggtggctgccaagccttcctgatccgggagctcttcccaacatggctgttggtcatggagatcctcaatgtcacgctggtgccctacggaaacgcacaggaacaaaatgtcagtggcaggtgggagttcaagtgccagcatggagaagaggagtgcannattcacgtcg

SEQ ID NO: 37786 - DNA, 391 bp, Homo sapiens
gcttcttcctcagggaacttgatgaccacctcagcctagaaaaataaggacagcctgtaaaagcacaggggcagagaagtgggtgaaactccttagataatattctctgactcacatctaggaccatcactgaaaaaagctccaggcagtcccaatcacttctgatccattagctgacaaattgaggcagcaaaaacttttagaacaaaacacgtatttgctgaaaatgctttttagagcaagacttctaattttctgctggtatagtagccccatagagctgcttaatacaaaaatcccagctggtacacaggctgttacagttgcaatcagaaacagcttggtgtccctgggaagtgtgatttattcacatttgaaagaagagaaagaa

SEQ ID NO: 37787 - DNA, 386 bp, Homo sapiens
tttttttttttacaggggaaccatagcctcactttatttcaaattttaggactgaccaaaaaaaaggttcacagatatttcttcagggaaggaaagggggcaaatagcccattgaggcaaaccacccaatctaaacgtactttcccgggtaaacaaacggggaagcccaaacctcacaaaggaggaaagcaaaccttgggggggcaaaaaggtgttcattgggaaggagtcaggaacacaaaaaaaaggttcatgacctcatccaggataaagaggactcttggggaaggggacctccttccccatgctgtctttgccccaagcccttaatgaaccaggggagggaagtttgtccaaaacctcatctggttagacatttgcagcag

SEQ ID NO: 37788 - DNA, 376 bp, Homo sapiens
gttattctcagacaattttcgccatcccaaccctatcccaagtgggcttcctcctttccccagctccccacagacatccagtgactggcctacagcaccagaaccacagagcctcttcacatcagaaacaatcccagtatcatcctctacagactggcaagcagcttttggctttggttcttctaaacaaccagaggatgacttgggttttgatcccttcgatgtcactcgaaaagccttagcagacctgattgagaaggaactgtccgttcaagaccaaccttccctttcgcccacatctcttcagaactcctcttcacacactacaaccgccaaaggtccaggctctggattcctgcatcctgctgcagctacc

SEQ ID NO: 37789 - DNA, 373 bp, Homo sapiens
cacaggtgaacctatgggtcgtggaacaaaagttatcctacacctgaaagaagaccaaactgagtacttggaggaacgaagaataaaggagattgtgaagaaacattctcagtttattggatatcccattactctttttgtggagaaggaacgtgataaagaagtaagcgatgatgaggctgaagaaaaggaagacaaagaagaagaaaaagaaaaagaagagaaagagtcggaagacaaacctgaaattgaagatgttggttctgatgaggaagaagaaaagaaggatggtgacaagaagaagaagaagaagattaaggaaaagtacatcgatcaagaagagctcaacaaaacaaagcccatctggaccaga

SEQ ID NO: 37790 - DNA, 358 bp, Homo sapiens
ttttttttaaagaattaatttttaatattctaaaggtgcttactcttacaaattaataaaaattagatagaaagcacaatagaagaacgtacaaagataaatgtttcttcacaaaacggccaaatcagtaacacaggctttgtgttcaaagtattgattagtgcatacttcactaataaagaatctatagtatgtattttattagtattctagaaaatttcagacaatcagcaaatggaatgaattttattatcaatatgccatagaaattcaggcatctaatttttctagcttatgttatgttgagcctgcttgtgggctctctacctggaggagggacaggataagaccagcagta

SEQ ID NO: 37791 - DNA, 274 bp, Homo sapiens
cgcaggtgcgccagaactaccaccaggactcagaggccgccatcaaccgccagatcaacctggagctctacgcctcctacgtttacctgtccatgtcttactactttgaccgcgatgatgtggctttgaagaactttgccaaatactttcttcaccaatctcatgaggagagggaacatgctgagaaactgatgaagctgcagaaccaacgaggtggccgaatcttccttcaggatatcaagaaacccagactggatgactgggagagcgggct

SEQ ID NO: 37792 - DNA, 374 bp, Homo sapiens
  misc_feature (1)...(374): n = A,T,C or G
ggacaacatagcaagactctgtctctacaaaaaataaagaattagccaggcatggtggcgtgaacagagtgagaccttgtctccaaaaagaaatgactgagatttactcattcttcatgttaggcacattgattgagcatttggcagccattggcagcaggctttccattttgtacatgacttcattccatctccatgaagactctagctaggtcactcattgcccatggaccacagagaatatatttatatatatacatatattggagatggagtcttgctctgtcacccaggctggagtgcagtagtgcgatcttggctcaccgcagcctccgcctgctgggttcaagcgattctcctgcctcaacctaccn

SEQ ID NO: 37793 - DNA, 384 bp, Homo sapiens
gcactccaggctccttcttggaccccaggctgtgagcacactcctgcctcatcgaccgtctgccccctgctcccctcatcaggaccaacccggggactggtgcctctgcctgatcagccagcattgcccctagctctgggttgggcttggggccaagtctcagggggcttctaggagttggggttttctaaacgtcccctcctctcctacatagttgaggagggggctagggatatgctctggggctttcatgggaatgatgaagatgataatgagaaaaatgttatcattattatcatgaagtaccattatcataatacaatgaacctttatttattgcctaccacatgttatgggctgaataatggcccccaaagatatctg

SEQ ID NO: 37794 - DNA, 369 bp, Homo sapiens
ctcaagcaggtgctggacattgattttcataccctggtttcataaaaaccctgccaaaatggatctgagcatgaagatcaatgtccagcacctgcttgagatagacctgcaaacattaaaaataatcactttactttcaaacattttaatattagactttcaacactttaaatgaacattaaattaataagattgaaatgaaaagaaacatctttcttattttaatggagttgatttgcttaacacaaatattccttcattcttcatttatccatttattcattcaataaatagttacttaacacttggcatatgatgagtaccagtctatgtgtatggggatacagccttgaacaaaagagacaacat

SEQ ID NO: 37795 - DNA, 391 bp, Homo sapiens
  misc_feature (1)...(391): n = A,T,C or G
gctactcctactggatctagtggagtcagcgtgatccgcttctcccactcacctagtccccacacgccctgagagctagtccctgtggtctgatgtccacccctcacttcttctgccctttccttatacttccctgctggagtgactggaagtggggatgctcttccctggacacaggggagaaggagggcccctggggttgtcacttcctctgcccttttgggtggggcaggaagggcacatttgatgttagcaattcagcgtaaaagtgaaaactaatttggcctcaagatttaagagtcatccaaacaacagttacagggctaatatctttaatctttacacatttgacaatatccaataaaaagaacaccaaactacatcaagacan

SEQ ID NO: 37796 - DNA, 377 bp, Homo sapiens
cacgtccagtctgaaatgaaaggctacttcctttttaccacatatataccacgcccctagtcttagagataccctctgagacaaagagccactcttatgtgcgattgaatatacaggaatctttccgccacccattggaatggtccacatgggacctgcctatggcctgagccggcaggtgcagcataagattgataaacaatatgatgcagatctggagcagatcctgatccagtggatcaccacccactgccgaaaggatgtgtgccggccccaacctggacgcgagaacttccacaactggctcaaggatggcacggagctatgtgagctcattaatgcactgtaccccgaggtcgacgcgtcctcaaaatata

SEQ ID NO: 37797 - DNA, 391 bp, Homo sapiens
tggggacgtcatcagccaagctggaagccattaatgaactaattcgttttgaccacatatataccaagcccctagtcttagagataccctctgagacagagagccaagctaatgtggtagtgaaaatcgaggaagctctccgccacccattggaatggccaacaggggacctgcatatggcctgagccgggaggtgcagcagaagattgagaaacaatatgatgcagatctggagcagatcctgatccagtggatcaccacccagtgccgaaaggatgtgggccggccccagcctggacgcgagaacttccagaactggctcaaggatggcacggtgctatgtgagctcattaatgcactgtaccccgaggtcgacgcggccgcgaattcc

SEQ ID NO: 37798 - DNA, 375 bp, Homo sapiens
ctcctgggttcaagtaatcctcctgcctcagactcctaactagctgggacgacaggtgtggaccaccatgcccagctaatttttttgtttgttttctttttcttttttgtagacacaaagtctctgtgtgttgcccaggctggtccttgaactcctggcctcaggcagtcctcccactttgacctcccaaagcactgtgattacaggaatgggccattttttccagcctttagctatgtttctgtagctagactcttacaaagcttccaaatttgaggtcaagttgttttaataactcctgaattaaaagtaatacatggtcgggcatggtggctcatacctataaactcagcactttgggaggccaaggtgggc

SEQ ID NO: 37799 - DNA, 372 bp, Homo sapiens
ccatttctagtcgttttcaaagcgcctcgcgctgattctcacgggcccggctgccggcccccgctctgccctggattggtagcttatgtcgatcttgatgaaagagcaattgatgctctcagggaatttaatgaagaaggagctctgtctgtactacagcagttcaaggaaagtgacttatcacatgttcaggtaaggccgttactcaaaaatgtctttgaacaattagtaatctgaaattattttactattactttttttcctatggagaagtggtattttttgtttgtgactacctcttcttttaaaaaattagtttaaaggaaaaaaactgcttgtggcagagtttcagaagcccaagtataaagcaaa

SEQ ID NO: 37800 - DNA, 397 bp, Homo sapiens
  misc_feature (1)...(397): n = A,T,C or G
cctatatggaagtggccaacagatataatatacagtgatcattctctatgccacaaattagctaatgctttcttggttttatatttattttatggagctttgcccttgatgcactgatgccttaaaaattaacaaggtcattcagaagtagattacattgcctaaagtagaatgtgtaagtaatgctgtaataatacatatcatagtatattataatcagtatgtcatagtgttaaaggtgttttgttttcttattgatacttttccacaggcatctctgcatgaatttcttccacagtaaaaatacgttttttgtaaaggcaattgtacataatactcatcacttaattcaccacactctcacttcctttattagccttatacatctcanactctt

SEQ ID NO: 37801 - DNA, 388 bp, Homo sapiens
  misc_feature (1)...(388): n = A,T,C or G
cgcagtgatatccaaccattaaaaagatataagttacatagctcgtatataatcaacttacttattactgcactatgaggggcacccagatatgtaagacagagtcccaacctttggttgttggaggactatctaaggatacagagattaataaaaataaaagaactaccacgaaagaagtgccctccaagtacaaagagagttcaaatatgtacatctgggtgcggagaaaggaaaaacttctcaaagaagaatttgaagtgagctttaagggttgaatggaatttttactgttagaggtagagattacaatatcataaagaaagatgtgatccctacaagaggattacgtggtaagttgaaagacattaaacagtccaacctggtn

SEQ ID NO: 37802 - DNA, 375 bp, Homo sapiens
  misc_feature (1)...(375): n = A,T,C or G
ggtgtatgtagcagttcttaaatcagcagtattatgaaaaaaaattccccctcattagaatgtttaagaaatctttttaaaaagtaaaattctgtcagactacaaatgtttagctgttactcatttctagggaagaaattctaaatccctccttcactttgagcagtgttctaattggataaatgaaggagagtagttttattctgaaggtaattaaatttagactatgtagtatgtgacagaatttttttaaaattataaaaagattttatttagtaattgggatttacttaaaataattttggaataatgctcccagacttgcccagatttgtgtattggacttattgccactggccgccactttgacttatn

SEQ ID NO: 37803 - DNA, 378 bp, Homo sapiens
ctactttgcaagccagtgacctgccttttgaggggacattggacgggggccgggggcgggggttgggtttgagctacagtcatgaacttttggcgtctactgattcctccaactctccaccccacaaaataacggggaccaatatttttaactttgcctatttgtttttgggtgagtttcccccctccttattctgtcctgagaccacgggcaaagctcttcattttgagagagaagaaaaactgtttggaaccacaccaatgatatttttctttgtaatacttgaaatttatttttttattattttgatagcagatgtgctatttatttatttaatatgtataaggagcctaaacaatagaaagctgtagagattgg

SEQ ID NO: 37804 - DNA, 390 bp, Homo sapiens
gcctcctgctgtagctgggaataaatgtccaccaggctttcacacctctcctggagtggggccaggctctcctcaaacggtgcgccattccctgccagctgctgctgccgtttccaaatctggatcctcttcagcactagggctttggctgcctctagctctccagtggtctcctgcagtagcatggccagggcctcacttggcccagtcccattagcaggagtttctatcaagctgtgcagagacacttggccagcctcagcccccttctgcagggcttctcggagaaggtggatctcccctactcggtgctgcagcctccgcaagcctgtcttaaacttgagttcttcctgcttccagtggaaaggcattggcaagtggcggaactgt

SEQ ID NO: 37805 - DNA, 361 bp, Homo sapiens
cggccacagccgcctccttgtgtttctgttgtcttccctgctgctgcccacatcctttacccaccgtgtctctcggcccactggaggtatcagaaattccaaattttcaaagcagtttcagtattttcagtatatatgttgggattttataatggttcatggccagaaaaggttcagcacctcccacacctttaaggaagaaaaatgaaaatgacactagttttgaaatgtaagagaattaaagtactgttaaaaatgaaaagaaattggcaaacatcaggaagtacaatactaaaagccccagtttatgataacaaaagttttcccagggtatgccagtaagtaaaatacgcaaggagag

SEQ ID NO: 37806 - DNA, 387 bp, Homo sapiens
ttttgagatcttactgtttgtcactcgaatcccaggattgtcatacatctctggtataagcaacatttgatttttgaagtgagcagaccatctgttcatatcttcaagatgtaattttacatttctgcatttttaaaacagtttggccataatcctagatgcacgcttctaattcatgtacctgcacatgtgacctttgtgaacagaaatttgcatgtataattcgtgtttacttgtaactttctgggtatatactgcttatatctgtggattcaagttactgaagtgaataccaataaaaagaaaaccctaggccatgttaattggttatacatgtttggaatgctaaaaaaaaaaaaaaaatttcaacgcggcgggaatttcaaa

SEQ ID NO: 37807 - DNA, 361 bp, Homo sapiens
  misc_feature (1)...(361): n = A,T,C or G
gcccgccaccacgcccagctaattttttttgtaggtgtagcacagtcggggtttcaccgtgttaaccaggatggtctcgatctcctgcccttgtgatccgcccgcctcggcctcccaaagtgctgggattacaggcgtgagctaccacgcccggccgtcttgtgtcttctttactgtgactgggtcgtttttaagaaaggttatcagctttgtgtttggtttcccacagttgataaaaatctatcaaaaacattataatttgcaaggaaaaaggtttttcaatggctgcaggaaccagaaagaaatagcatttcttatctgtataaacacaaacatttaaagctagtcacaccgcaggtan

SEQ ID NO: 37808 - DNA, 495 bp, Homo sapiens
  misc_feature (1)...(495): n = A,T,C or G
ggtgcaccattcgagatccctagtccagngttgtggaatcccatgagatggaatccagcctgggcaatgtatcaacaacctatctctaaaaaataatataaaaatacctggatctaccttttttctttggtcataaataagtcgactgtgagggtcacttttatttctattgaggctaagatcccaggtcctggagcaggccagccccttctctctgctgtgtgattctgagtaaatgggttcacctctctgaactcaatttctgcatgtataaaggggaatcacaattcctcccctaaggatggctggatgagaattccatacaatgcttgtgaagctggcacaatgccttgcgtgtaagaggcgttcaagaaacaggcgctattattcgtgcgtgtattctacatgaagaaagtcagtctgagagatctgtgaccgcatcctatggaaacggatgtgtggatttgcgcccaaattagagagcatggctagcgg

SEQ ID NO: 37809 - DNA, 498 bp, Homo sapiens
  misc_feature (1)...(498): n = A,T,C or G
agaggccnnnnggcncggcccactgagaccctagactgagnacactaggccagngcggnggaattcccaaacgcagagactgagaaattctggatgttttaccgttttgatgccatcagaaccttcgggttcctgtcacgactgaagctggcacagactgccctgacagtggtagctttgccaccacgctattacttgtactcccagggcctcctcactctcaacaccgggtgcctcatgagtgggatatcgcgctttgccctgaccatgctgtgctggatgagctatttcttacagagactgcttggtatcctgtatctgaatgagtctggcaccatgctgcggatggcccatctgaacttctggggctggcggaaggacacatactgtcccatggcagatagtgatttccctgacataaaccaaagaccaggctcacgagatgtctgtgcagatccatcggtacagcgggaaacagaccttatacgtgaccctgcg

SEQ ID NO: 37810 - DNA, 494 bp, Homo sapiens
  misc_feature (1)...(494): n = A,T,C or G
tggtccgcattcgagaccctatgcagngttgtggaatcccatgagtttgagtccagcctgggcaatgtagcaacaacctatctctaaaaaataaaataaaaatacctggatctaccttttttctttggtcataaataagttgactgtgaaggtcacttttatttctattgaggctaagatcccaggtcctggagcaggccagccccttctctctgctgtgtgattctgagtaaatgggttcacctctctgaactcagtttctccatgtataaaggggaatcagaattcctcccctaaggatggctggatgagaattccatacaatgcttgtgaagctggcacaatgccttgcgtgtaataggtgttcaagaaatggtagctattattcaggcgtgtcttctacatgaagaaagtcagtctgagagttctgtgacggcatcctatggaaacggttgggtggatttgcgcccaagttggagagtatggttagcgtg

SEQ ID NO: 37811 - DNA, 496 bp, Homo sapiens
  misc_feature (1)...(496): n = A,T,C or G
cgggcccaatagatnccctatcgagatccctagncagtgtggaggaattccaggaggcagcgctctcgggacgtctccaccatggcctgggctctgctattcctcaccctcctcactcacggcacagggtcctgggcccagactgccctgactcaacctgcctccgtgtctgggtctcctggacagtcaatcaccatcacctgcactggaatcaggagtgacgctggggacagcaactatgtctcctggtaccagcacccccccggcagagcccccagactcctcatttatggcgtcaatcatcgaccttcaagggtttctgatcgcttgtctggctccaagactggcgggacggcctccctgaccatctctgggctccagtctgaggacgatgctgattattactgcagctcacatggtcttagtaccactctcggcggcgggaccaggctgaccgacctaggtcagcccaaggctagccactccgtcactctgt

SEQ ID NO: 37812 - DNA, 487 bp, Homo sapiens
  misc_feature (1)...(487): n = A,T,C or G
atcatagaccctttgccagggcggaattgagatcttctgaagaagccgnncgcatatccacccaacatggaggagcccccatgacgtgccaagcagcgtgctggcccctgtggctgcgttagggaacagaatcggcaaacgcagtcccagagttgatgcctgatcaagagaagccaacttcagcagtgtggtcacctggatactcgagtatagaccctagatcacctggatactcgagtatagaccctagaagtgtatctaggcgcgggcagggccccacaacagcaggtctgactcattccatccagggcagcatcagggagagcttcctgggggaagtggcatttgggctgacctgggaagggtggtgggtgttaagtcagtttgggtggggctggaggagcaagggtgcatccccacaacaggatgtgacttctgaaaagacatcagagtagagaaaatggtttctcaaggagattgcggacgc

SEQ ID NO: 37813 - DNA, 477 bp, Homo sapiens
  misc_feature (1)...(477): n = A,T,C or G
catggacnccnatagagattcttaggacagngcggnggaattcagctcacgcctgtaatcccggcactttgggaagccgaggtgggcagatcacgaggtcaggagattgagaccatcctggccaacatggcgaaaccctgtctgtactaaaatacaaaaaattagccaggagtggtggcgcacgcctgtagtcccagctgcttgggaggctgaggcaggagaatagcttgaacccgggaggcaggggttgcagtgagcaaagatcgcgccactgcactccagcctggcaacagagcaagattctgtctcaaaaaaaaaataaataaataaataataataataatatactgaattgagttttaaacatttaaacattaataacataagttgcttctctcacatggtcttaatagccatgaattaggtttgttttaggtaaaagtttttctgaaaattttccacagcttttgttccagg

SEQ ID NO: 37814 - DNA, 500 bp, Homo sapiens
  misc_feature (1)...(500): n = A,T,C or G
aactggataaccctcgcaangnccnnaacttgagtacactgggaagngncgnggaattctctgcggccagcggaccgggcgcctggggcactgaccactactgcctggagctgctgcggaaacgggattatgaaggttatttatgctccctgctgctccctgcagaatcccgaagctctgtttttgcactgacggcctttaatgtggaactggctcaggttaaagactcagtctctgagaaaacaattggactgatgcgaatgcagttctggaaaaaaactgtggaagatatatactgtgacaatccaccacatcagcctgtggccattgaactatggaaggctgttaaaagacataatctgactaaaagatggcttatgaaaatcgtcgatgaaagagaaaaaaatctggatgacaaagcatatcgtaatatcaaggaactggaaaattatgctgaaaacacacagagctctcttctttacttaacactagaaatattg

SEQ ID NO: 37815 - DNA, 488 bp, Homo sapiens
  misc_feature (1)...(488): n = A,T,C or G
atagaccccctattgtagaccactaggccagngnggnggaattcgatataggtgtgagccaccgcgccaagccccaacctcccaaacttatgccactgggtgaaccatctggtggctgggggccgcttgtccctggttaagaagggtggcttgagttatctcactggaattaaacagtagtgctactttatatcaagcagttacattgttgggccctaagcacttttcatacatcatctcatagaatcctccagcaccctgtgaggtaggttgttgttggagccacttcacggtttaggaaattgaggctttgagaggtgaaatcgcttgccttagagtcctgggccaggaagtgatgagattctaactgatcatgggaaggctggccctggagagcacccagaggactgaggaataggtaatgaggccaaggtgaggtggaaacaggcaaaaggatgagctcctcaccccccgtgggcctgcttatg

SEQ ID NO: 37816 - DNA, 493 bp, Homo sapiens
  misc_feature (1)...(493): n = A,T,C or G
aaatagaatanccttgtgcangngcnggaatantaagtatccatgtgtagctccgntgcccacgctggagtgcagcggcgtgatctctgctcactgcaacctccacctcctaagttcaagtgattctcctgtctcagccttctgagtagctgggattctagttggagtgcttagtgcagttggtgagagcgggagccacactcaacgtctccaccacacggtacgcgcagacgccagcccacattgcagcctttgggggacatcctcagtgcctggtctggctgattcaagcaggagccaacattaacaaaccggattgtgagggtgaaactcccattcacaaggcagctcgctctgggagcctagaatgcatcagtgcccttgtggcgaatggggctcacgtcgagggaacttcaacatggagttacttttgatccctcagttttaattcagtgtctaaagcctgagaaatgccagtggcctgacagcagca

SEQ ID NO: 37817 - DNA, 496 bp, Homo sapiens
  misc_feature (1)...(496): n = A,T,C or G
ggaggccncattggtnccccttttgtaganccctagtccagngcggnggaattcctggaactggtggagcccattaagaagcacgaggtcccagcaaagtctgatgtttactgtgaggtgtgtgaattcctggtgaaggaggtgaccaagctgattgacaacaacaagactgagaaagaaatactcgacgcttttgacaaaatgtgctcgaagctgccgaagtccctgtcggaagagtgccaggaggtggtggacacgtacggcagctccatcctgtccatcctgctggaggaggtcagccctgagctggtgtgcagcatgctgcacctctgctctggcacgcggctgcctgcactgaccgttcacgtgactcagccaaaggacggtggcttctgcgaagtgtgcaagaagctggtgggttatttggatcgcaacctggagaaaaacagcaccaagcaggagatcctggctgctcttgagaaaggctgcagcttcn

SEQ ID NO: 37818 - DNA, 487 bp, Homo sapiens
  misc_feature (1)...(487): n = A,T,C or G
cgcgaatgagnccctggccactgagaccataggccagagncgnggaattcgaggaagccactgcatctgttggctcagggccccagcctgtgcgagcagggcgcctgggctgttgtgtctcctgtctgtgccgatctctattaaaggactccctcttggtgggcctggccgagtccctcctttgtgctcccagggactattttctcctcgtaagccagcgacctgcctaaagcttgggctgtgcctgcaaagcttgtgcaggacctgggggccaggtcgaccttcaagtggcttttggggccccaggttgagctctggatgtttcaagccaaggctcggctattcccgccccatagtaaatttccttttccctggaattttccaagttggcttcagctgaagagctgttttgtgaagcatcccaggcttgcccaggagagacatttgccactatgtcaccttatctgggcttgccctggngcactga

SEQ ID NO: 37819 - DNA, 487 bp, Homo sapiens
  misc_feature (1)...(487): n = A,T,C or G
cactgataccctcgcagnggcnggaaattttgattccgtgatatatccccaagtgctcgtgctgtgcgaggatctcactggttgtttattgaaaggctaagcaagtaggttgaggtccctgggaagcaggggtggatcctgtgtcaccagggctgccccttaccctaaaccttggccccgacaacccacccacctgcccagcagtgctgatctgggacgatgcccgggagggcaaggactccaaggagaagctggtgctggagttcaccttcaccaagccagtgctttctgtgcgcatgcgccatgacaagatcgtgatcgtgctgaagaaccgcatctatgtgtactccttccccgacaatccccgaaagctgtttgagtttgatacccgggacaaccccaaggggctctgtgacctctgccccagcctggagaagcaactgctagtgttcccgggacacaagtgtgggagtctgcaacttgtgga

SEQ ID NO: 37820 - DNA, 436 bp, Homo sapiens
  misc_feature (1)...(436): n = A,T,C or G
gaggtaatggggatatgaaggaagaatcagctgcacaattatgttgttgtcatatgcccatggccctgggagggacagggggctccctgtcccccagcctggacttacagctcttccgaggggaccaggtcttctcagcctgcagaccacttccatacatgggggatgctcgtggcccatcctgtgccaactggctgagtcccttgcccctggcaccgggcaggtctgcactgctggcctgcctacaggacctggacctgaacctgtgcaccccacagacggcacccctgagcacagacctgcagggcctccaagaggacgccttgagcatgaagcacgagccaccagggctgcaggccagctccaccgatgacaagaaattcacagtcaagtacccacagaacaaggacaagctgggaaaacagccagaaagagn

SEQ ID NO: 37821 - DNA, 491 bp, Homo sapiens
  misc_feature (1)...(491): n = A,T,C or G
cagtccncattgagatcatatccanngtttgagaatccgctgcatcgcgggaggcgcatggcggggatggcgctggtgcgggcctggaagcagatgtcctggttctactaccagtacctgctggtcacggcgctctacatgctggagccctgggagcggacggtgttcaattccatgctggtttccattgtggggatggcactatacacaggatacgtcttcatgccccagcacatcatggcgatattgcactactttgaaatcgtacaatgaccaagatgcgaccaggatcagaggttccttggggaagacccaccctacgaagttggaatgagaccatcagatgtgataagaaactcttctagatgtcaacataaccaaccttataaagactaaaattcatgagtagaacaggaaaatcatcctgactcatgtgttgtgttctttatttttaattttcaaagaggctcttgtatagcagtttttgtctt

SEQ ID NO: 37822 - DNA, 502 bp, Homo sapiens
  misc_feature (1)...(502): n = A,T,C or G
aactggattaccttcgcangnggcggganaactgataaccctctgaagngnccnggaantctaagcatgttccagcttaatggaatgtacaacacattcattgtaggcacaagcaaaggtattcaggtcaccgcatctagccaagactgtcagcctgaaaagtgctatattgagagcccttaacatgtatgggggacatgcccaggatcttctcaaaacaagccctatcacagagctgctccacgatctaaaaggatcctgtaaataaatgggcaagaggctcttggaagtctcctttactgtcctggggttcacaggatagaagcacacgtctgacttaatctcaaaatcctcaatgctgccccataatggaagagtctgcttacctgtggccaccgtttcagcttttcttcctagatataagcaccaaggaaaatcaatgctggtacatagcatgcattccataaatatttttcgagtggatgagcacatgaatgaatat

SEQ ID NO: 37823 - DNA, 488 bp, Homo sapiens
  misc_feature (1)...(488): n = A,T,C or G
ggagcccctttgtaccatagcagnggtagaaatcctcgaatggtgggcgggcaggacacgcaggagggcgagtggccctggcaagtcagcatccagcgcaacggaagccacttctgcgggggcagcctcatcgcggagcagtgggtcctgacggctgcgcactgcttccgcaacacctctgagacgtccctgtaccaggtcctgctgggggcaaggcagctagtgcagccgggaccacacgctatgtatgcccgggtgaggcaggtggagagcaaccccctgtaccagggcacggcctccagcgctgacgtggccctggtggagctggaggcaccagtgcccttcaccaattacatcctccccgtgtgcctgcctgacccctcggtgatctttgagacgggcatgaactgctgggtcactggctggggcagccccagtgaggaagacctcctgcccgaaccgcggatcctgcagaaactcgctgtgcn

SEQ ID NO: 37824 - DNA, 495 bp, Homo sapiens
  misc_feature (1)...(495): n = A,T,C or G
ccccccccccgccgcccnnaactgaaaccnactgagaccctaggccanngcgtggaattcgcagcccacgtggtgcagagggtgagctttgctgattccgatatagtgcccccagccagtacctgggtgttccccaccttgggcatcatgcaccacaacaaacaggccactgagaatgcaaaggaggaagtgaggcgaattctggggctgctggatgcttacttgaagacgaggacttttctggtgggcgaacgagtgacattggctgacatcacaggtgtctgcaccctgttgtggctgtataagcagggtctacagccttctttccgccaggcctttcccactaccaaccgctggttcctgacctgcattaaccagccccagttccgggctgtcttgggcgaagagaaactgcgtgagaaaatggcccagtttgatgctannaaatttgcatagacccaaccttagaaggacacaccacggaaagagaagggt

SEQ ID NO: 37825 - DNA, 478 bp, Homo sapiens
  misc_feature (1)...(478): n = A,T,C or G
gccccaatagagacccctagaagagcctggaantcgccaagattaattatttttctatgtgaagaatatacaatatcctcacttcttaagagatttctccattttattatctttgtcaaatatcaaatgactagatatatgtaaatctgtttctgaactttctattatcttccattagtctattcatatttgcatatatagcacacttttaattactgcaaatacataaaatgtcttgatgtcttatcgcataaacccacctctttctattttcttttgatgttttggttattcttgactgttgcttttgtttacagattttagactcagcttgccagttttcaccaaaaaactgctgagaattttattaaatatatagattattcaaaggagcactgatagctttacaacattgaattgtccagtatctgaatagcaccacatattttaaattttcattgaagtataaatatatgtn

SEQ ID NO: 37826 - DNA, 485 bp, Homo sapiens
  misc_feature (1)...(485): n = A,T,C or G
cgcgtgatgagaccntnggaatagaagaccctaggacagngcggggaattcgaccgagattcccgacgagagagactgaggggaagagaggaaggaggggcgggctcctggcaaggcattcgctcctgagcggaatcctgcaaagatggagaaggaggagacaacccgggagctgctgctgcccaactggcagggtagtggctcccacgggctgaccatcgcccagagggacgacggcgtctttgtgcaggaggtgacgcanaactcccctgcggcccgcactggggtggtcaaggagggggaccagattgtgggtgccaccatctactttgacaacctgcagtcgggtgaggtgacccagctgctgaacaccatggggcaccacacggtgggcctgaagctgcaccgcaagggggaccgctctcccgagcctggccagacctggacccgtgaagtcttcagctcctgcagctctgaagtggttc

SEQ ID NO: 37827 - DNA, 500 bp, Homo sapiens
  misc_feature (1)...(500): n = A,T,C or G
caatgattagccctcgcaagnggcggaanncaatgaggaccgtcgtcagngcgcagcctcatcctcagcctggctgactcgggccacctgccggacgtgcatgggttcaacagctactgtagccaccgaaccctgcagagactcagcagcggttttgatgacattgacctgccctcagcagtcaagtacctcatggcttcagaccccaacctgcaggtgctgggagcggcctacatccagcacaagtgctacagcgatgcagccgccaagaagcaagcccgcagccttcaagccgtgcctaggctggtgaagctcttcaaccacgccaaccaggaagtgcagcgccatgccacaggtgccatgcgcaacctcatctacgacaacgctgacaacaagctggccctggtggaggagaacgggatcttcgagctgctgcggacactgcgggagcaggatgatgagcttctcanaaatgtcacagggatcctgtggaacctttn

SEQ ID NO: 37828 - DNA, 481 bp, Homo sapiens
  misc_feature (1)...(481): n = A,T,C or G
cgcgcatgaaccctggcactgagaccctaggacanngcgnggaattcccgctcgggaaagtggctccaagagcccgccacaggggacgccatggactcgcggcatgctctgcgggccaggatgagttctaagcacagggtgaacttgaaaagctgaaattcctaggagatctgtcttctctcagccaagctttaccttatgatgaaaccgcaaaatcattcattcacagccacatagcagacattgtgcataccttaaatgtactggtacaagaggaacgcccgcattctctgtccagttccatgcgccaggaggtctttgtcaccatcgctgatctcagttaccaagatgtccatttgctgttgggctctgaagatcgagctgagttgttcagtcttaccatcaagagtataatcactctgccctctgtaaggacccttacccagatacaggaaatcatgcccaatgggacctgcaacan

SEQ ID NO: 37829 - DNA, 442 bp, Homo sapiens
  misc_feature (1)...(442): n = A,T,C or G
attggcagtgcccacttctatgccatcgtggtatcccaagggttactttgtccagaacacagactttgacttcttcagctacgcaggactgctgtggtctctgcttctatacacgacaccccccacctacatcgatgacgtcaccgtcaccaccggcgtgaagcgagacagtggtgagggcttctggactggatggaggacctgaagacgtgaggtggaggcacaggtagaagagaagattctcaccatcgctgattcacacaaaagcatttctccaagtggttgcagatgacatgatttcccaaagtgttagagctgaagtgtgtttccttgtgtatatatactgtggttcctttatcccttcatctgtggatagacagacagagtcttgctcttgttgcccaggctggagtgcagtggcgcgatttcggctcaatgcacn

SEQ ID NO: 37830 - DNA, 518 bp, Homo sapiens
  misc_feature (1)...(518): n = A,T,C or G
cacctaggagaanccccatgcgcagngnggcggaannnnaaactgagatccnctcgccangngccggaattccggctgattctgcatctggaaacagccttcatcttgaaagaaaagctccaggtcccttctccagccacccagccccaagatggtgatgctgctgctgctgctttccgcactggctggcctcttcggtgcggcagagggacaagcatttcatcttgggaagtgccccaatcctccggtgcaggagaattttgacgtgaataagtatctcggaagatggtacgaaattgagaagatcccaacaacctttgagaatggacgctgcatccaggccaactactcactaatggaaaacggagagatcaaagtgttaaaccacgagttgagagctgatggaactgtgaatcaaatcgaaggtgaagccaccccagttaacctcacagagcctgccaagctggaagntaagttttcctgggttatgccatcagcaccgtactggatcctggccc

SEQ ID NO: 37831 - DNA, 495 bp, Homo sapiens
  misc_feature (1)...(495): n = A,T,C or G
ccactgaaacccttcgcannggcggaancggatgaaagcctggccaggagccccaactactcatgaggcggatgcaagacaatggcgtctacccggaaagcggaggttgcattgagccacgattgtgcgactgcactccagcctgggtgacagggtgaaacgccatctcacaaaataaaaattgaaaaataaaaaaagaacctggatctcaatttaatttttcatattcttgcaatgaaatggacttgaggaagctaagatcatagctagaaatacagataattccacagcacatctctagcaaatttagcctattcctattctctagcctattccttaccacctgtaatcttgaccatataccttggagttgaatattgttttcatactgctgtggtttgaatgttccctccaacactcatgttgagacttaatccctaatgtggcaatactgaaaggtggggcctttgagatgtgattggatcgtaaggctgn

SEQ ID NO: 37832 - DNA, 470 bp, Homo sapiens
  misc_feature (1)...(470): n = A,T,C or G
catgagaccntgttgagggcctgaaaacggacgccggntangggtgtggcggaggaggactgcggngcgcggtcctagggccccatcagccacggccaggggagcgctcaagacagaaagccggtggctgcctcacctccacctgtaatgcaggagggagaattggctatttctcctataagccctgtggcagccatgcctcccctaggcacccacgtgcaagccagatgtgaagctcaaattaacctgctgggtgaaggggggatctgcaagctgccaggaagactccgtgacgtcctgtatgagctgctccagtacatcaagacccagcggcgagccctggtgtgtgggcccttttttggagggatcttcaggctgaagacgcccacccagcactctccagtccctccaggagaggtgactggcccctctcagatggacaccacgaggagccacctgctgcagccact

SEQ ID NO: 37833 - DNA, 495 bp, Homo sapiens
  misc_feature (1)...(495): n = A,T,C or G
tggggcgattcgagaccatagtcagagttgtggaatccctttataaaagggcacaggggaacaaccgaaacccagaagaaatgcaaggaagcacacatatatcaggatcattttacaagctccataattgaagctttgtatcatcgtcgggtcagattcattatcaaggctttcattcaggactttgaacttgagcctcactcacgaagtgctgagtgaggaagcagttttaagtgtggaaggcaggcagcaatttgagattcaatctggtctcccagatgagaagcctgtgccacctcccgcccatgcacagaggtctgttgcctcccagcaagagagccgccatccccaccaacgcgaccactcacaagacacagccccaccgaggggagcatcccgacatcaccccatgactcagcctcctgggactactagcctagcatgatgacgtggtgcatgaagtgcctgtatcaaggagagccttgggagcacatn

SEQ ID NO: 37834 - DNA, 489 bp, Homo sapiens
  misc_feature (1)...(489): n = A,T,C or G
aggggatcgagacatcgtagagcactaggcagngcggcggaattcgcaggatccaggcctgcatgtgtggcgggtggagaagctgaagccggtgcctgtggcgcaagagaaccagggcgtcttcttctcgggggactcctacctagtgctgcacaatggcccagaaaaggtttcccatctgcacctgtggataggccagcagtcatcccgggatgagcagggggcctgtgccgtgctggctgtgcacctcaacacgctgctgggagagcggcctgtgcagcaccgcgaggtgcagggcaatgagtctgacctcttcatgagctacttcccacggggcctcaagtaccaggaaggtggtgtggagtcagcatttcacaagacctccacaggagccccagctgccatcaagaaactctaccaggtgaaggggaagaagaacatccgtgccaccgagcgggcactgaactgggacagcttcaacactgtgga

SEQ ID NO: 37835 - DNA, 493 bp, Homo sapiens
cgccccatttgagaccacattcgagagtcgtggaattcctcatccctgaggtcccccggcagctggtgacgaactgcacccagcggctggagcagggtccctgcaaagaccttttccaggaactcacccggctgacccacgagtacctgagcgtggccccttttgccgactacctcgacagcatctacttcaaccgtttcctgcagtggaagtggctggaaaggcagccagtgaccaaaaacaccttcaggcaataccgagtcctgggcaaaggtggctttggggaggtgtgcgcctgccaggtgcgggccacaggtaagatgtatgcctgcaagaagctagagaaaaagcggatcaagaagcggaaaggggaggccatggcgctgaacgagaagcagatcctggagaaagtgaacagtaggtttgtagtgagcttggcctacgcctatgagaccaaggacgcgctgtgcctggtgctgacactgatgaacgg

SEQ ID NO: 37836 - DNA, 493 bp, Homo sapiens
aggtgccccaatcgagaccctatagaggccttgaattcctctacaaaagattgcaaagttagctgggtgtggtggtgcacactgtggtcccggctacttggggtgctgagatgggaggatcagttgaaccccggaggttgaggctgcagtgagctgtgactgcaccattgcacagcagcctgggcaagtgagcaagaccctgtctcaaaaacaaaacaaacaaaaagaaaaaaccaaaaatgtttgaagaccacttccccagaacagaggaggggatggatttgagagttcatggtggcttctaggacccagctcctggagcccaagagtgccagcccactgaccaggctctctgctcctctttgcccacaggttacgaagtgacagtgctggtgcgggactcctccaggctgccatcagaggggccccggccggcccacgtggtagtgggagatgttctgcaggcagccgatgtggacaagaccgtggctgg

SEQ ID NO: 37837 - DNA, 494 bp, Homo sapiens
  misc_feature (1)...(494): n = A,T,C or G
gggcccgcattcgagatccntagtccagagttgtgaaatccgctgctgtcagcatgtgttttcaaagtgcagcctgcctcagagttcttcggagcctgaaaaggggtttgagaaagagcccagtaggaggggcaggaggccgacacacctgacttggcctggggcccaggaggcaggtgtaagggagtgaaaagaaaggctagccggaggctgcggggggaagaccgcagactccctgctgcttcgcatccctcctgtggcctccactgcaggcaggacaaacctggatgccacctggagctgcttcctgagttggcacactatcgtgtacacagcagtcttcagccccctggaaggaggccatagtcgtgtgaggatggcaaagtcgaacaggaagctttgagtgccttcctccacgatgtcaacgaggagatccagtgccagatcgaggtggatggaacacccaggggtaggggtgcaggtgtgggcagtgn

SEQ ID NO: 37838 - DNA, 444 bp, Homo sapiens
gtgtgctcccaggactggcatgacaggtgtctcctcctcaccacaggctgtgcccatgagtccctgtgcagaccagtgggcaaggcagctgggccagatctcaggccagccgtttgtgctcctagcagggttgctgtgctggccacacggagaggccctagagagcctcatggattgtaactaaagaagaaacggttcctttttgtttttttaaaaatgatttttaaataccgttttttacaccgttctctcggtactttttttaagctaagtcagcattgtcttccagtgttaaagggcatccctcacctctgcattgaacttacgtatccatgccaaggaatggaatttccatcctgagccagttcagttaggtgtcaattgatactattttaattttttatgcaatctgatgagatgagctcagatttaaaaatctcaaaa

SEQ ID NO: 37839 - DNA, 498 bp, Homo sapiens
  misc_feature (1)...(498): n = A,T,C or G
gagccnccntttgannccntnnnnannnttcgtagaccctantccatgtggtggaattcctcctcggctcctcgcccgacttcaacagccagtttggcctcgtggacatccctgtggagttcaagctggtcattgcccaggtcctgctcctggacttctgcctggcgctcctggccgaccgcgtcctgcagttcttcctggggaccccgaagctgaaagtgccttcctgagatggcagtgctggtacccactgcccaccctggctgccgctgggcgggaaccccaacagggccccgggagggaaccctgcccccaaccccccacagcaaggctgtacagtctcgcccttggaagactgagctgggacccccacagccatccgctggcttggccagcagaaccagccccaagccagcacctttggtaaataaagcagcatctgagatttttnnanannannnnnnnnnnnnnnnnnnnnnnnnnannnnnnnnnnngnn

SEQ ID NO: 37840 - DNA, 489 bp, Homo sapiens
  misc_feature (1)...(489): n = A,T,C or G
agcgggaatcgagatcatagaccagcgtcgtggaattcgacctcgtgatccgcccaccttggcctcccaaagtgctgggattacaggcgtgagctaccgcgcccaaccaattaccctttttgagagttagtttctccctatgaaactgcagatactggtacaactgctcaggactttttcacagattaaatgaatcaacatacataaggtacctagcacaggcctgggcacatggaactgtgctctcggactctgggagaggagcttcaaggaaacaagtccatcccagaggctccctggatgacagggacaagactccttccactaggtggggatgatgtgtttgggaacctaagagccactccaaagctacatgacggtggagggatggactgagaaactgcttgtgtgacccaaacagaagcccttctccactgagaacaggggcgtcccttcaacaaggacagcaggagctcaccatgtccacgn

SEQ ID NO: 37841 - DNA, 502 bp, Homo sapiens
  misc_feature (1)...(502): n = A,T,C or G
caattgatacccctcgcagngngcgggaaactgagtacactatgaagagtgccggaattccaggaatccaggcaaagccacttgctgtcccttttcctctcctagggtcaggccagggagaaagagaaggggtggactttaatgtgaggttgctgcctctttttctagattttcttccctaaaaaatgcttaaatcatgttgaccagagataggacctgtagacctctcacccacttttctgcctctggcacttgaaaggtttttcaaggatgtcagcactgtggctgggggaggcgggtcgccctcgccagcctctgctctggggtgggtcctggctcttccttgaggcctgcattggccagctccgctgcgagcaccctgcttgtgccctgtgactgcagttcatacagtggaacatgcacaagagtggcctcaaggtatacgagtacagcctcccctcagatgccacgggcccctttgtgctgtctggatacagcggcn

SEQ ID NO: 37842 - DNA, 505 bp, Homo sapiens
  misc_feature (1)...(505): n = A,T,C or G
caactggatgtnccttccgcanngggcgngnnnaatgatnatccgtgtgcagngncgnggaattccttctccatcgcagccccaccttggctgctgagccttgagctaaaaccttanctatctggttctgttttgcacccagcttggctgatgtggattggaatccaagccttgtgtctgcccctatgtgacatctctatattttatccccgttttataaaagaggaaactgaagttctgaaaatctccttccagggccccagctaactaatgccataagtgagattcaaaccttcatccttctgtctccagggcctgatctttaccactgcaggggctgcaggccgttaagtggacaggaagtggccccacatagcccgagcagggtctggaagcatcctgtgctgtgcacacctgctctctcctctctcccaggcatgcatctgcaggcgctctcctccttctctgcctgagtccctgctctgttcctttccaccctggtgag

SEQ ID NO: 37843 - DNA, 492 bp, Homo sapiens
  misc_feature (1)...(492): n = A,T,C or G
atcagtagaccctctgcaanggcgggaanattgatgagcctntgaacannctcagctcctccaacccctgccttggccaccatgaccacacttactccctcccacgggaaactgtctctatggatctagagagtgagagctgtacaaaggaggggacccagatgactccacagcatatggaggagctggcagagcaggagattgctaggctagtactgacagatgaggagaagagtctattggagaaggaggggcttattctgcctgagacacttcctctcactaatacagaggaacaaattctgaaacgtgtgcggaggaagattcgaaataaaagatctgctcaagagagccgcacgaaaaagaaggtgtatgttggaggtttagagagcagggtcttgaaatacacagcccagaatatggagcttcagaacaaagtacagcttctggaggaacagaatttgtcccttctatatcaactgaggaaactcc

SEQ ID NO: 37844 - DNA, 503 bp, Homo sapiens
  misc_feature (1)...(503): n = A,T,C or G
cgcgggcaaatcgaganccatacgtagagcactccggcagngcggnggaacacgcgagccgtgctgtcgggtgtgatatgctctccatcctccgtcgtctctgcagcactccgggttctcctccagagcgctagtcccaggagctcggaatgttcgtggaacttaataacctgcttaacaccacccccgacagggcggagcaggggaaactgactctactctgtgatgccaagacagatgggagtttccttgtacaccactttctctccttctatctcaaagctaattgtaaagtctgctttgtggcactcatccagtccttcagccactacagtatcgtgggacagaagctgggtgtcagcctgaccatggcgcgggagcgtgggcagcttgtgttccttgagggactcaagtctgcagtggacgtcgtcttccaggctcaaaaggagccacaccccctgcagtttctcagggaggctaatgctgggaacttgaaaccattg

SEQ ID NO: 37845 - DNA, 496 bp, Homo sapiens
  misc_feature (1)...(496): n = A,T,C or G
gagggccccngggggtgcncncaaatggagaccacatagaaggcgttggaanncacaagnggcacggcttgtgctagaccatgatggacttcctgcgctgtgtcaccgcgggcctcatctactttgctatctccatcacggccatcgccaagtactcggatggggcttccaaagccgctggggtgcacggcttctttgctaccatcgggtgtgcaactgatttctacctgatctttaacgacgtggccaaattcctcaaacaaggggactctgcagatgagaccacagcccacaagacagaagaagagaattccgactcggactctgactgaaggcctggcgggtgccttggcaacctgagccacacaggcctccacccctgcgcctcacaggggtcgctggcgttggagcggaggcctggacttctgagttgcagagggggctgcggacacagcaagccccctacagcctcaggttcttgctgagccagcctacc

SEQ ID NO: 37846 - DNA, 476 bp, Homo sapiens
  misc_feature (1)...(476): n = A,T,C or G
catgagaccctaggcagtgcttggaattccctagnttgctgatccctgagtaagtaatgacatatttttgctgaattaaaagaaaaacctcattttaatttttgtatttgattttagatattcacactgcagaggcgctgccagaaaaaggaccaagtcacagcatcattcctcttgcggttgtactgacactgatagtcattgtggccatttgcacactttccttctgcatatacaagcataacggtggcttcttcaggagacttgcagggtttcggaatccttactatcctgcaaccaactttagtacagtatatttagaagaaaatattctcatttctgatcttgagaagagtgaccaataataatgaggtcagagaatgccacagacaccaggaaaaaagtgtactgagcatggtggcacgcacctgtggtcccagctacttangaggctganggaagaggatcaactgcgg

SEQ ID NO: 37847 - DNA, 493 bp, Homo sapiens
  misc_feature (1)...(493): n = A,T,C or G
gaggtcccngnnnccccnccatagagaccaatggaagagcggtggaattcgctccatccaagataggtatctttcgtgtaattgtcactgtggttgtcatctccttggaacctcagagcagacagggttcctaggtgaggctctgcccctagaccacaactgtgaggggcccctgcttgtgccggccacaccaaagacccacccaggggcctctttatgtcaaggatgctacgcccaacccacctccaccctaaggtctggggctgcagtagcttaactccccaatgcttagtcccctaataccatgggaccactcaggtgatgctgggaaggggacagggcccatgataggccaggtgtggccttcacagcaccccatcttccaacatgtggaccccaaaggtacatttccagggcatggctctcagctgaagtccgtccccatggaagaccctcctcccactgggccagggagccagcacggccctgccca

SEQ ID NO: 37848 - DNA, 489 bp, Homo sapiens
  misc_feature (1)...(489): n = A,T,C or G
agagggaatcgagatcttagaccagcgtggtggaattccagattcgcagtggtcgcttcttctccttggatttgttaaggattccaagtaactcttatttggagagaagacgatctgcacttcgcattttggcattgacatttaattttagggtcctttatatagaagggagagtaggtaaactgatttttttttttaacagggagggtttgacaatctttggcagacttggagcaaaagattgaggtgcatttcatgcctccttttgagagtcttgctctgtcgcccaggctgtagtgcagtggcgcaatcttggctgcaacctcagcctcccaagtagctgggattacaaacataagccaccacgcccagccctcataccttttttaaaagtcgacctgttttgcagaaagtctgctgtttttgtactaaaggctttggaatttggcatttagctaggaatgcacattctttcacctcattcatacn

SEQ ID NO: 37849 - DNA, 442 bp, Homo sapiens
aggaggtacaatccccagtggtcagaatggtaaggctggctcctctcagctcctcctctgcctcatccatggacagttcctttgcttgtgctcctcttggttggctagagtaggcatcacactggggagcgtgggcagctgagaccttggggctcctgggaaggacagggtgggtggagcattcacagtagaagcagagagggcagggcaggaaagtgacatggctaggtggctcttaccctgccttccgcctctccacagtgtgacaagctggctgctgactgtgcccacgagctgcggcgccatggggtcagctgtgtgtctctgtggccggggattgtgcagacagaactgctgaaggagcatatggcaaaggaggaggtcctgcaggatcctgtgttgaagcagttcaaatcagccttctcatctgcagaaaccacag

SEQ ID NO: 37850 - DNA, 498 bp, Homo sapiens
  misc_feature (1)...(498): n = A,T,C or G
gaggccnaattcgagatccctagtccagagttgtgagaacccttagatcttgggggcctaaagagacccccgtcctgcctcctttctttctctgtctcttccttccttttagtctttttcatcctcttctctttccaccaaccctcctgcatccttgccttgcagcgtgaccgagataggtcatcagcccagggcttcagtcttcctttatttataatgggtgggggctaccacccaccctctcagtcttgtgaagagtctgggacctccttcttccccacttctctcttccctcattcctttctctctccttctggcctctcatttccttacactctgacatgaatgaattattattatttttctttttcttttttttttttacatttggtataaaaacaaattcatttaaacaaacttattattattattttttacaaaatatatatatggagatgctccctccccctgtgaaccccccagtgcccccgtggggct

SEQ ID NO: 37851 - DNA, 495 bp, Homo sapiens
  misc_feature (1)...(495): n = A,T,C or G
agagtttcncaggccggccccccaatagatgaccnatagacaagcgctggaaancgcgccagcagcgccctctctagaagcttctgaggaacaggtcgcccggctcatggagatgggattttccagaagtgatgctttggaagccctgagagcttcaaacaatgacctcaatgtcgccaccaacttcctgctgcagcactgatagtcccaggccaacactgggaccggaccggcagccgagtgacagtgcgtggtccccaccatcagatcagcccggggaccgagcatctctggtgctgatgttcttgtgggaagagggaggttccaccgcacccctgccctcaaccgcaagactgttgccgttttagtgtggagataagtttgccattacattagcatgtatattctatctatattttttattgggcattttccctaggttggagagtcagcactcgttntgaatgtgtttaacatgcattataatggaagatn

SEQ ID NO: 37852 - DNA, 483 bp, Homo sapiens
  misc_feature (1)...(483): n = A,T,C or G
cccccttgtacccatagaggccttgaanncggacgacaagctggtggaggacctgaggacccgggagagcgaggagcagaagcggaaccgggtgcgcggcatcctgcggatcatcaagccctgcaaccatgtgctgagtctctccttccccatccggcgcgacgacggctcctgggaggtcatcgaaggctaccgggcccagcacagccagcaccgcacgccctgcaagggaggtcctggcattgatgtgcctgctccagacatgagcacaggtgagcgggagatgtcctggatcgctgatacctatgccagcaccatagggcactatgatattaatgcacacgcctgtgttactggtaaacccatcagccaagggggaatccatggacgcatctctgctactggccgtggtgtcttccatgggattgaaaatttcatcaatgaagcttcttacatgagcattttaggaatgacaccagggtn

SEQ ID NO: 37853 - DNA, 496 bp, Homo sapiens
  misc_feature (1)...(496): n = A,T,C or G
aacttgagnagccttgtgcangnggcggaattcgatgataaacctaagggagctctcggggttggcttcttggaggctgctttctcctttacttggaaggcttcgctagtgatggacccatacatgattcagatgagcagcaaaggcaacctcccctcaattctggacgtgcatgtcaacgttggtgggagaagctctgtgccgggaaaaatgaaaggcagaaaggccaggtggtctgtgaggccctcagacatggccaagaaaactttcaaccccatccgagccattgtggacaacatgaaggtgaaaccaaatccaaacaaaaccatgatttccctgtccattggggaccctactgtgtttggaaacctgcctacagaccctgaagttacccaggcaatgaaagatgccctggactcgggcaaatataatggctatgccccatccatcggcttcctatccagtcgggaggagattgcttcttattaccactgtc

SEQ ID NO: 37854 - DNA, 487 bp, Homo sapiens
  misc_feature (1)...(487): n = A,T,C or G
cgtggaaatcgatactttagacagcgtcgnggaanncccgatacttgggcgggctcccactccttgaggtatttcagcaccgctgtgtcgcggtccggccgcggtgagccccgctacatcgccgtggagtgcgtagacgacacgcaattcctgcggttcgacagcgacgccgcgattccgaggatggagccgcgggagccgtgggtggagcaagaggggccgcagtattgggagtggaccacagggtacgccaaggccaacgcacagactgaccgagtggccctgaggaacctgctccgccgctacaaccagagcgaggctgggtctcacaccctccagggaatgaatggctgcgacatggggcccgacggacgcctcctccgcgggtatcaccagcacgcgtacgacggcaaggattacatctccctgaacgaggacctgcgctcctggaccgcggcggacaccgtggctcagatcacccagcgcn

SEQ ID NO: 37855 - DNA, 465 bp, Homo sapiens
  misc_feature (1)...(465): n = A,T,C or G
cattgacccccatgaaggcgtgganaccctcctgggcttcttgatagnccccgctttggaggggccttttgcactgcccagttacctgtatggcgacccccttcgtgcccagctcttcatcccactcaacatcagctgcttgctcaaggagggcagcgagcacctgtttgatagctttgaacccgaaacgtactgggatcgaatgcacctcttccaggaagccattgcacacaggtttgggtttgtacaagataaatattctgcctctgcttttaacttccctgctgagaacaagcctcagtatatccacgttacaggaacagtgtttctgcagctgccctactccaagcgcaagttctcagggcagcagcggcggcggcggaactccaccagctccaccaaccagaacatgttctgcgaggagcgggtcggctacaactgtgcctacaacaccatgctcaccan

SEQ ID NO: 37856 - DNA, 491 bp, Homo sapiens
  misc_feature (1)...(491): n = A,T,C or G
agcgggaattganncccttgagatcactaggccangnggtggaattcgcccaaacgctgtccacacccgctcacctttgatgtcaacaatcccctgcatctggactatgtgatggctgctgccaacctgtttgcccagacctacgggctgacaggctctcaggaccgagctgctgtggccacattcctgcagtctgtgcaggtccccgaattcacccccaagtctggcgtcaagatccatgtttctgaccaggagctgcagagcgccaatgcctctgttgatgacagtcgtctagaggagctcaaagccactctgcccagcccagacaagctccctggattcaagatgtaccccattgactttgagaaggatgatgacagcaactttcatatggatttcatcgtggctgcatccaacctccgggcagaaaactatgacattccttctgcagaccggcacaagagcaagctgattgcagggaagatcatccn

SEQ ID NO: 37857 - DNA, 500 bp, Homo sapiens
  misc_feature (1)...(500): n = A,T,C or G
ccatagattnccttcgcannnncnncnnanactgatgaccttgtgcagngngcnggaattctcacgccggaagcccgacatcccagtgccttacctgtatttcgacatgggggcagccgtgctgtgcgctagtttcatgtcctttggcgtgaagcggcgctggttcgcgctgggggccgcactccaattggccattagcacctacgccgcctacatcgggggctacgtccactacggggactggctgaaggtccgtatgtactcgcgcacagttgccatcatcggcggctttcttgtgttggccagcggagctggggagctgtaccgccggaaacctcgcagccgctccctgcagtccaccggccaggtgttcctgggtatctacctcatctgtgtggcctactcactgcagcacagcaaggaggaccggctggcgtatctgaaccatctcccaggaggggagctgatgatccagctgttcttcgtgctgtatggcatcn

SEQ ID NO: 37858 - DNA, 491 bp, Homo sapiens
  misc_feature (1)...(491): n = A,T,C or G
cactgaataccttcgcagggcgggancaggtgagcacccttgtactcactctcccaatagcagttacccaaactctcctgggagcagcagcagcacctaccctcactctcccaccagctcagacccaggaagccctttccagatgcgagctgatacgcccccacctgcttacctgcctcctgaagaccccatgacccaggatggctctcagccgatggacacaaacatgatggcgcctcccctgccctcagaaatcaacagaggagatgttcaggcggttgcttatgaggaaccaaaacactggtgctctattgtctactatgagctcaacaatcgtgtgggtgaagcgttccatgcctcctccacaagtgtgttggtggatggtttcactgatccttccaacaataagaaccgtttctgccttgggctgctctccaatgttaaccggaattccactattgaaaacaccaggcggcatattggaaaaggag

SEQ ID NO: 37859 - DNA, 490 bp, Homo sapiens
  misc_feature (1)...(490): n = A,T,C or G
agcgggaattgannccattgatgactctaggccangncgtggaattccacagcatggacatgagggtccctgctcagctcctgggactcctgctgctctggctcccagataccagatgtgacatccaaatgacccagtctccatcctccctgtctgcatctgttggagacacagtcaccatcacttgccgggcgagtcagggcattagcagttacttagcctggtatcagcagaaaccaggaaaagttcctcagctcctgatctatgctgcgtccactttgcaatcaggggtcccatctcggttcagtggcagtggatctgggacagatttcactctcaccatcagcagcctacagcctgaagatgttgcaacctattactgtcaaaaatataacagtgccccgtacacttttggccaggggaccaagctggagattaaacgaactgtggctgcaccatctgtcttcatcttcccgccatctgatgagca

SEQ ID NO: 37860 - DNA, 484 bp, Homo sapiens
  misc_feature (1)...(484): n = A,T,C or G
agcgggaatgagacatagacagcgtcgggaanncccgnggngaagatgcagaagcatgttaccttcaaccaagtgaaaggcattttcggcttcactgacagcgactgcattgggaagatcaattttgctgccatgcaggctgctccctccttcaacaactcattcccacagatcttccgagacaggacggatatccagtgccttatcccatgtgccattgaccaggatccttactttagaatgacaagggacgtcgcccccaggatcggctatcctaaaccagccctgttgcactccaccttcttcccagccctgcagggcgcccagaccaaaatgagtgccagcgaccccaactcctccatcttcctcaccgacacggccaagcagatcaaaaccaaggtcaataagcatgcgttttctggagggagagacaccatctaggagcacaggcagtttgggggcaactgtgatgtggacgtgtctt

SEQ ID NO: 37861 - DNA, 507 bp, Homo sapiens
  misc_feature (1)...(507): n = A,T,C or G
aatttgattccctttcgcangnnncnnnnnnnactgagatccntgtgcagngngcnggaattccccacctattccaccccaagcagggggccattgcccacgtcctcccagccctgcacaaggaccggccccgttttgactttgccaatttggcggtggctgccacgcaagaggatccgcctaagatgggagacctgagcaagctgagcccaggactgggtagccccatctcgggcctcagtaaattgactccggacagaaagccctctcgaggaaggttgccctccaaaacgaaaaaagagtttatctgcaagttttgcggcagacactttaccaaatcctacaatttgctcatccatgagaggacccacacggacgagaggccgtacacgtgtgacatctgccacaaggccttccggaggcaagatcacctgcgggatcacagatacatccattccaaagaaaaacccttcaaatgtcaggagtgtgggaaaggattttgtcagn

SEQ ID NO: 37862 - DNA, 491 bp, Homo sapiens
  misc_feature (1)...(491): n = A,T,C or G
agcgggnaattgannccactgatgacactagtccangtcgtggaattcgggtgcgggtggctcacgcctgtaatcccagcaatttgggaggccgaggcgggcagattacttgaggtcaggagttcgagactaggctggccgacagggtgaggcactgtctctgctaaaaatacaaaaattagccggacgtggtaccatatatgcctgtaatgccagctactcgggaggctggggcaggacggtcgcttgaacccgggaggcggaggttgcagtgagccgagatcatgccactgcactccagcctgggtgacagagtgagactccgtttcaaaaaaaaaaaaaaaacccacccaaaccccaaaattcaccccgccccgggggggcttgtttgtacccccacctattgggagggctggggcacaaaaattgtttaaactgggaaggcaaaggctgcagaaaccaaaaattgccccactgatttccagcctggg

SEQ ID NO: 37863 - DNA, 493 bp, Homo sapiens
  misc_feature (1)...(493): n = A,T,C or G
ccctagagtgcctttgcangnggcggaattcgttgagcgccgttgagacccccgccgggccactggcacttgcttctgcggcgagtcccacccacgaccgcagcccagcaactcgcaaacgcaacctgaagcctgggctgcgcagtgtgggagggcttcgcgatcttgggggacccattccgaacttgcagaggaccgtagctctcctggcctggagagtgtgaacaggtgagtgtcacgcacgtgtccaggcagctctttcgggacgacttcctgcagacccattccgagccctgagcgcgctcggcctctgagtcggtcctcttggtcaccgggttctcctcccagggcggctttggggttcgctgcgagggagatgtgaacaccagcagcctatcttgacagggctctcctagctgagagggaaaatgcccttttgacttaaggctgcattttctccctagcctgaaagcaagtgacttgcagtccacan

SEQ ID NO: 37864 - DNA, 503 bp, Homo sapiens
  misc_feature (1)...(503): n = A,T,C or G
caattgaaagccttgggcanngggcgnnnnnaatgatntccatatccangngcnggaattcgctgtggataagcgggaagctgctatctctctgacccatgagaatgctcagaggcttcggttgcaggacaggatttggatcatccacctcgacatgacctcagaaaggagctggacacacctgccctggggccccatggacctgattgtcagcaaccctccctacgtcttccaccaggacatggagcagctggcccctgagatccgcagctatgaagaccccgcggccctggatggtggggaggagggcatggacatcattacccacattctggccttggcaccccggctcctgaaagactctggtagtatcttcttagaagtggacccaaggcacccggagcttgtcagcagctggcttcagagccggcctgacctgtaccttaatcttgtggctgtgcgcagggacttctgtgggaggccccggttcctgcatatccggn

SEQ ID NO: 37865 - DNA, 496 bp, Homo sapiens
  misc_feature (1)...(496): n = A,T,C or G
ccatagatnagccttgggcangnggcggaattccatgagcgccatagtgagacacggcggngtgaatacgtcctcaccttcaacttccagggcaaggccaagcacctgcgtttgtcgctgaacgaggagggtcagtgccgggtccagcacctgtggttccagtccattttcgatatgctcgagcacttccgggtgcaccccatccctttggagtcgggaggctccagtgatgttgtccttgtcagctatgtcccatcctcccagcgacagcagggccgggagcaggctgggagccatgcgggggtgtgcgagggagatggatgccaccccgatgcctcctgcaccctcatgcccttcggagcgagtgactgtgtaaccgaccacctcccatgacccaccccagccccctgaacccccttcatggacagatcccccacagcctggggcagaagaggcgtcgagggcgccagaagtggcggcagcagcagccgcagct

SEQ ID NO: 37866 - DNA, 479 bp, Homo sapiens
  misc_feature (1)...(479): n = A,T,C or G
agcctccaatgagaccctattttgatggcgtaagancgagcaactaaatctggntgccccagatcaactggatttattagaaaaatgcctaaagaacatccacagaatagacctgaagacaaaaatccagaagtacaagcagtctgttcaaggagcacggacaagttacaggaatgttctccaagcagcaatccaaaagagtctcaaggatccttcaaataacttcaggctccataatgggagaagtaaagaacaaagacttaaggaacagcttggcgctcaacaagaaccagtgaagaaatccattcaggaatcagaagctttttgcctcagagcatacctgaagagagatacaagatgaagagcaagcccctaggaatctgcctgataatcgattgcattggcaatgagacagagcttcttcgagacaccttcactttcctgggctatgaagtccagaaattctcgcatctcagtat

SEQ ID NO: 37867 - DNA, 475 bp, Homo sapiens
  misc_feature (1)...(475): n = A,T,C or G
gccgtcctatgagaccctnacntgagatctaggacgngcggggaanctatcttcagcctctttctctacatgaaggcgcaggtagccccagtttcggccctggtacctggggggaactcaggcagtccgatttacgacttttttctgggacgagagctcaaccctcgtatctgtttcttcgacttcaaatatttctgtgaactgcgacccggcctcatcggctgggtcctcatcaacctggccctgttgatgaaggaggcagagcttcgaggcagtccctcactggccatgtggctggtcaatggcttccagttgctctacgtgggtgatgccctctggcacgaggaggccgtcctcaccaccatggatatcacacatgacgggtttggcttcatgctggcgtttggggacatggcctgggtgcccttcacctacagccttgaagcccagttcctgctgcaccacccgcaacccc

SEQ ID NO: 37868 - DNA, 480 bp, Homo sapiens
  misc_feature (1)...(480): n = A,T,C or G
ggccgtccaattgagacccctgatagagcgccgtaaggcncgccacctgaagcccagtgctgttgccccacagagaaagatgccactggatgacaccaaactgattatccaccagacactcagcgtcttagaagatattgtggagaatatctcgggggagtccaccaagtctcgacagatttgctaccagtcgctgcaggaatctgttcaggtctccctggccctctttccagcttttatccatcagtcagatgtgactgatgagatgctgagcttcttcctcactctgtttcgaggccttagagtacagatgggtgtgcctttcactgagcaaatcatacagactttcctcaacatgtttaccagagagcagttagccgagagcatcctccacgaaggcagcacaggctgccgggtggtggagaagtttctgaagatcctgcaggtggtggtccacgagccaggccaggtgttcaagcc

SEQ ID NO: 37869 - DNA, 498 bp, Homo sapiens
  misc_feature (1)...(498): n = A,T,C or G
ccactggattagccttctgcangngcgggaanncaaatgactgccgtagccaccgccgcaatcatggtgtcagtaattaacactgtggatacctcccatgaggacatgattcacgacgcccatatggactactatggcacccgcctggcaacctgctcatcagacaggtccgtcaaaatctttgatgtgcgcaatggagggcagatccttatcgccgacctcaggggtcatgagggtcctgtgtggcaagtggcctgggctcaccccatgtacggcaacatcctggcatcgtgctcctatgaccggaaagtcattatctggagagaggaaaacggcacctgggagaagagccacgagcatgcgggacacgactcctcagtgaactcggtgtgctgggccccccatgactacggcctgatcctggcctgtgggagctcggatggggccatctccctgctgacttacaccggggaaggccaatgggaagtaaagaagatc

SEQ ID NO: 37870 - DNA, 491 bp, Homo sapiens
  misc_feature (1)...(491): n = A,T,C or G
cgccgcccatcgannccattgatgtccctagtccangtcgtggaattcgcagctttacactggaataagtctgcctctgcctctgcctcaccctgctggctcctggtgggtttcatcccaggcagagttgacattgctggaggggtttggtggactcctaagaatcatgaaaccacaggagcatgtttaggaagagatttgtctctggtccctgtctctgaaaggacacagatgctaaatatttattgtcttagatcatggattcctgatacctctcactcaaggggaccaaaagggacccccccgtgttcatcccttgtaaggtgagttcagtctacgttgtctctttccagtcactggatgcgtggcaccaactggtcaatgggtgcttggtgccataccctgctcaccctagtctctgcaggccatgtcctgaagggttcctcaggaggtcgggactagggtgggagaggcactatctgagacctgcn

SEQ ID NO: 37871 - DNA, 495 bp, Homo sapiens
  misc_feature (1)...(495): n = A,T,C or G
ggatgtcnnnttagataccctacgcagngttgtggaatccttgaattattcttttctatatatttagttataaatctttctctgggccgggcgtggtggctcacgccagtaatcccagcactttgggaggctgagacaggcgaatcacgaggtcaggagttcgagaccagcctggccaacatggtgaaaccccgtctctactgaaaatacaaaaaattagctggacacggtggcaggcgcctgtgtgtggcgggcgccagctactcaggaggctgaggcaggagaatcgcttgaacccaggaggcagaggttgcagtgagccaagattgcgccactgcactccagcctaggtgacagtgcgagactctgtctcaaaaaaaaaaaaaaaaaaaaaaaaattttttttcggggccggtaaaccctttttttttggtccttggccggggaattttggaaaattggttcctagttttaaggggagaaaaactttgggaa

SEQ ID NO: 37872 - DNA, 510 bp, Homo sapiens
  misc_feature (1)...(510): n = A,T,C or G
ggtcccaaagagccncncgggccgcgccnnaattgagnncccactgatgttcctggacanngcgcggaattccgngcagctaggcggctggctgctcaggagtccagcgaggctgaggacatgagcgtccccagaggacccattgcacagtgggctgatggcgccatttccccaaatggccatcggccacagctcagagcagccagtggagaagacagcactgaggaggccctggcagctgccgctgcaccttgggaaggtggtcctgtgcctggagtggacacaagcccctttgcaaagtctctgggtcattccagaggggaggctgacctttttgattctggggacattttttccacgggcactggatctcagtccgtggagagaacaaaacccaaggcaaagatagcagagaatcctgccaacccaccagtgggtggtaaagcaaagagccccatgtttcctgctctaggcgaggccagcagtgatgatgatctctttcagtctgct

SEQ ID NO: 37873 - DNA, 505 bp, Homo sapiens
  misc_feature (1)...(505): n = A,T,C or G
ccattgataanccnatcgcagngngccggaattcctctgtgtctacaacaaaataaagaaattagccaggcatggtggcccatgcctgtggtcccagctactcangagactgaggtgaaaggatcgcttgagcccaagaagttgaggctgcagtgagccactgctccccaacctgggtggcagaccaagactctatctcaaaaaaagaaagaggaaaagatatacatagaaacaacaaaaagttaaaaagcaggagaatgaagttaaaatgtagagtttttattagttttctttttgcctttttgtttttgcaatcagtgttaagttgtcatcaatctaaaataatggcttatttgcaagcctcatggtaacctcagattaaatgttaaaacacaaaatagcaatgcaaaggcatgaacaaaattttgtatgcaatatgggtaggtttcaaaagtataatcttgaatgatgaaaagttgcagaataatgcattcagtatgataca

SEQ ID NO: 37874 - DNA, 515 bp, Homo sapiens
  misc_feature (1)...(515): n = A,T,C or G
ccattgataanccgttcgcagagngccggaannnccaaaactgattatccttggccagngngcnggaanncggaggcgggaacttgtctggcgccgactttcgaaggccgccgtccggtcgaggtgtccttatgactagtcttgaggaccatggccgagatctttgacgcctgcgcggtacgggtaagggatggactgcccctctcaccctctactgatttttaccacacccaagattttttggaatggaggagacggctcaagagtttagccttgcgactggcccagtatccaggtcgaggttctgcacaaggctgtgactttagtatacaacagcatcattcagaaagtgaagtggcattttaactatgtaagttcctctcagatggagtgcagcttggaaaaaattcaggaggagctcaagttgcagcctccagcggttctcactctggaggacacagatgtggcaaatggggtgatgaatggtcacacaccgatgcacttggagcctgctc

SEQ ID NO: 37875 - DNA, 492 bp, Homo sapiens
  misc_feature (1)...(492): n = A,T,C or G
gcccccattgatnccctngnnnnnttgtgagaccactatccatgtggtggaattcgacgagggatacgaaggtcagaaagaatttcagaccttaaaatgtggtatagaatgctctgcttccatggaaaggtttcctaaaaagccatttatttctctagctcccaaataggagcatcttttgtcccatacccttaaattctttaaggatcctacttcctatttagtgattttccttagagggtaccgtgagagctaaagtcctctttatggcttataaggtgctgcatgatatgcctgctcttccattgttttgggggagtataagaatatttctgagtattttagaggaactgcatgttagatcatttaacgtttcttttcccatcatgtctgaaatgtgtaagaggagtggtgatattaagatttgtttcagaaatcacaggaacatgaatgacagatgttacttctctatttttttttaatattagcaan

SEQ ID NO: 37876 - DNA, 488 bp, Homo sapiens
  misc_feature (1)...(488): n = A,T,C or G
aagggattgaacctagagagccgtgnggaattcgcgtttctcagaattgataagaccatggcacaaaactgtgacgattggctttggagtaaccctgtgtgcggttcctattgcacagaaatcagagcctcattcccttagtagtgaagcattgatgaggagagcagtgtctttggtaacagatagcacctctacctttctctctcagaccacatatgcgttgattgaagctattactgaatatactaaggctgtttataccttaacttctctttaccgacaatatacaagtttacttgggaaaatgaattcagaggaggaagatgaagtgtggcaggtgatcataggagccagagctgagatgacttcaaaacaccaagagtacttgaagctggaaaccacttggatgactgcagttggtctttcagagatggcagcagaagctgcatatcaaactggcgcagatcaggcctctataaccgccagga

SEQ ID NO: 37877 - DNA, 495 bp, Homo sapiens
  misc_feature (1)...(495): n = A,T,C or G
cgccccctttgataccctatggagagncgnggaanncgcgtgatgtctcacagaaagttctccgctcccagacatgggtccctcggcttcctgcctcggaagcgcagcagcaggcatcgtgggaaggtgaagagcttccctaaggatgacccgtccaagccggtccacctcacagccttcctgggatacaaggctggcatgactcacatcgtgcgggaagtcgacaggccgggatccaaggtgaacaagaaggaggtggtggaggctgtgaccattgtagagacaccacccatggtggttgtgggcattgtgggctacgtggaaacccctcgaggcctccggaccttcaagactgtctttgctgagcacatcagtgatgaatgcaagaggcgtttctataagaattggcataaatctaagaagaaggcctttaccaagtactgcaagaaatggcaggatgaggatggcaagaagcagctggagaaggacttcagc

SEQ ID NO: 37878 - DNA, 492 bp, Homo sapiens
  misc_feature (1)...(492): n = A,T,C or G
gcggccatgagaccttgagagcactggacangcggngagacacgccatgcctgcgtggcgggtgggagaagctgtacatcctgcgtgtggctgaagagatccagggcgtcttcttctcgggggactcctacctagtgctgcacaatggcccagaagaggtttcccatctgcacctgtggataggccagcagtcatcccgggatgagcagggggcctgtgccgtgctggctgtgcacctcaacacgctgctgggagagcggcctgtgcagcaccgcgaggtgcagggcaatgagtctgacctcttcatgagctacttcccacggggcctcaagtaccaggaaggtggtgtggagtcagcatttcacaagacctccacaggagccccagctgccatcaagaaactctaccaggtgaaggggaagaagaacatccgtgccaccgagcgggcactgaactgggacagcttcaacactggggactgcttcatcctgg

SEQ ID NO: 37879 - DNA, 448 bp, Homo sapiens
atcaataataattccgaacatggagccaaaaacatgtttgctatatctaaacaaggaagtaatttggtacaatcaaagcatttgaatccaggcagcatttcagtgcagacatctttgacaaatagctcacaaatagataagccaatgaagatggagaaaggggaaatgtatggaaattctccaagatttttaggtgccacaaatttgactatgtattctaagatctcaaactgtcagataaataatctgcatgtgtcttatactaacactgatgttccaatacaagtgaatagttccaaattggttcttccaggaagttcaagtttgaatgtaacttcagatcatatgaatacagaaattactacttataagaagaaattgagtactaatcagccatgccataagactgtaacagatgaagctcagagcaaccttaacacaacagttg

SEQ ID NO: 37880 - DNA, 492 bp, Homo sapiens
  misc_feature (1)...(492): n = A,T,C or G
agaggtncccagggcgccccccaactgaagacccatagaagagcgttgganncgactatagaggacacgatgggagtccaggaagggataggagacatggcagtggctcatgcgagaggggatggtggctttgagaccagcgtgggagcagaggaggtggtgagaagctgtcagagccttgatctgtcccatagcaaagctgacagcatttgatgatgaggtggatgtggcatgtgagagaagggaagggaaccttggatgaaggttttgtcctgagcagctggaaagctggagttgctggcagccaaagtagctggtttgagcaggtttgtccacgatggtgatggtgacgatcctgttaaacgccctcaggtccacaggccactgagcatttangttcacagaagaagagcaggcagggctggggaggatcagctcacgtgtagctgaaggtgggcagagcacctgagcctgagctctgaggcagcctgg

SEQ ID NO: 37881 - DNA, 497 bp, Homo sapiens
  misc_feature (1)...(497): n = A,T,C or G
cgcgcccatcgaaaccatttgagaccactaggcagngnggtggaattcgccagtgggtgaaagctcatgaactcaaggagcacaacggacacatcacaggtattgactgggctcccaagagcgaccgcattgtcacttgtggggcagaccgcaatgcctatgtctggagtcagaaagatggtgtttggaagccaaccctggtgatcctgagaattaatcgcgcagctacttttgtgaagtggtcccccctagagaacaaatttgctgtgggaagtggagcacgactcatttctgtttgttactttgagtctgaaaatgactggtgggtgagcaagcacattaaaaagccgattcgctccacagtcctcagcttggattggcatcccaacaacgttttgctggcagcaggatcatgtgacttcaaatgcagagtgttttctgcctacattaaagaagtggatganaagccagccagcacgccctggngcagcaagatg

SEQ ID NO: 37882 - DNA, 508 bp, Homo sapiens
  misc_feature (1)...(508): n = A,T,C or G
cccttgataccttggccagggcggaanncnnaactgagatccgtgtccagnggcaggaattccatggtaagaatggtgcctgtcctgctgtctctgctgctgcttctgggtcctgctgtcccccaggagaaccaagatggtcgttactctctgacctatatctacactgggctgtccaagcatgttgaaaacgtccccgcgtttcaagcccttggctcactcaatgacctccagttctttagatacaacagtaaagacaggaagtctcagcccatgggactctggagacaggtggaaggaatggaggattggaagcaggacagccaacttcagaaggccagggaggacatctttatggagaccctgaaagacatcgtggagtattacaacgacagtaacgggtctcacgtattgcacggaaggtttggttgtgagatcgagaataacagaagcagcggagcattctggaaatattactatgatggaaaggactacattgaattcaaca

SEQ ID NO: 37883 - DNA, 489 bp, Homo sapiens
  misc_feature (1)...(489): n = A,T,C or G
ggggnntttgagaccctggacagctgcgggaancctaaaatggcctttcctgaactcccagagtctgagctcgtgccattcctcaccaggaactacctcatacaaggcttcatggaaaagactgggccaaagcagagagaacctttcaagaaaaggtggttcgccctggattgccatgagcggaggctgctctattacaagaacccactggatgccttcgagcagggccaggtttttcttgggaacaaggagcagggatatgaagcctacgaagacctgcccaagggcatccgaggaaatcgctggaaagccggactcaccattgtcaccccagagcggagatttgtcctcacttgccccagtgagaaggaacagcaggaatggctggaaagtttgcggggtgtcctgtccagccccttgacgcccctcaaccggcttactgcatcaacagagagtggccgcagcagcaggtgacccattaactgagga

SEQ ID NO: 37884 - DNA, 493 bp, Homo sapiens
  misc_feature (1)...(493): n = A,T,C or G
agagcccccntttgannccctttagtagaccctagtccagagnggaggaattcgacgagggatacgaaggtcagaaagaatttcagaccttaaaatgtggtatagaatgctctgcttccatggaaaggtttcctaaaaagccatttatttctctagctcccaaataggagcatcttttgtcccatacccttaaattctttaaggatcctacttcctatttagtgattttccttagagggtaccgtgagagctaaagtcctctttatggcttataaggtgctgcatgatatgcctgctcttccattgttttgggggagtataagaatatttctgagtattttagaggaactgcatgttagatcatttaacgtttcttttcccatcatgtctgaaatgtgtaagaggagtggtgatattaagatttgtttcagaaatcacaggaacatgaatgacagatgttacttctctatttttttttaatattagcaatcct

SEQ ID NO: 37885 - DNA, 496 bp, Homo sapiens
  misc_feature (1)...(496): n = A,T,C or G
cattgaatccccttcgannnnccnnnaaatgattaccttggccangtgcnggaattctggggcccaggtcttgggagacgggcaggattggggacgagaggcaggaagagacgggtggggggcgaggagaaggcaggggtaggaggcaaagggaatctgaggacccgaaaggttggaggtggggttggaaagactggggccctgcggggaagcgagtctgcagcctgaaacaggagtttgtgggtcagagtttgtgggtcagagtttgtggggctgggatagaaactcgggggattggcgttcagatgctgaccacttccctcttctctgagcagtgtgacttcaccgaagaccagaccgcagagttcaaggaggccttccagctgtttgaccgaacaggtgatggcaagatcctgtacagccagtgtggggatgtgatgagggccctgggccagaaccctaccaacgccgaggtgctcaaggtcctggggaaccc

SEQ ID NO: 37886 - DNA, 496 bp, Homo sapiens
  misc_feature (1)...(496): n = A,T,C or G
agtcnnattcgagaccctaggcagangtgtagaaccctagttacctgggcttgtggacccttggagcaggagcaagggtttccagggctgtccctagagggctttctagaagacctgcagctgctcctgggtgcatctcctgaggtatagggccagggcctcagtctctcaagacctactttgtgtcaggcaccagggagatgataccaagtggagggtcctatagaatatggtgcatcctgcgccaagtacttccaggattatcttactcaaccttcatgacatcctcagagatggaggctgtgaaccctctcgttatactgacgaagaaacaaactggggctaagaaacttgctcataggctggctgagctgtgattctggcataggctgagtgacctggagctggaggccttattcatcacaccaggcttgaggaggggcggataggacaggaatataccaggcagtagggacagtctggacaaaagcctgga

SEQ ID NO: 37887 - DNA, 490 bp, Homo sapiens
  misc_feature (1)...(490): n = A,T,C or G
aactgatacccctcgcaggngcgggaacatagatccatcgcaaccccaccttggctgctgagccaggagctaaaaccttagctatctggttctgttttgcacccagcttggcagatgtggatttgaatccaagccttgtgtctgcccctatgagacatctctatattttatccccgttttataaaaaaggaaactgaagttctgaaaatctccttccagggccccagctaactaatgccataggtgagattcaaaccttcatccttctgtctccagggcctgatctttaccactgcaggggctgcaggccgttaagtggacaggaagtggccccacatatcccgagcagggtctggaagcatcctgtgctgtgcacacctgctctctcctctctcccaggcaggcagctgcaggcgctctcctccttctctgcctgtttccctcctctcttcctttccaccctggngtgggttctcctgttctctctgag

SEQ ID NO: 37888 - DNA, 495 bp, Homo sapiens
  misc_feature (1)...(495): n = A,T,C or G
cgcgcccatcgannccattgagatcactaggccangnggtggaattcgtctgtgtgcgtccagctgtgttgcacaggcctgggctccccactgagtgccaagggtcccctgagcatgcttttctgaagagccgggcctcagagtgtgtggctgtgtgtctgttcgactcccctcgccccattttcaccccacccccgcctctgatccccgggggcgagattggcgcgggagtgtggccgcgccccatcagatgttctcccttcaccagcgggagcttgatatcccttgtctgtaacatagaccccgggtactgcgggaggggagggctgctggggaggatggggggatgttatataaatatagatataattttattttcggagctaagatggtgttatttaagggtggtgatgggtgagcgctctggcccaggctgggccagactcccgcccaagcatgaacaggacttgaccatctttccaacccctggggaag

SEQ ID NO: 37889 - DNA, 494 bp, Homo sapiens
  misc_feature (1)...(494): n = A,T,C or G
acggcccattgaaccatcgagancactagtccangtggtggaattcccagcatgtaaaactgcaggacaaggcagaacttctttctgggatgtactcgtttgctcattatatatttcttttaaaggaactgatagaaataattaaatcaaacatgaacctttgcagtgtggaatttatttttggaaaggtatttgattttgcttccgtctgtatactggacatgattccatcatcttttcttttatcagaaaagaaaacaggctgggattgtctcgcccactccgcccactaaggcagctggtggagcgggcaccacggcccaccattatcaatgcggaaaacctgaagggccttgacgatctggacgccgatgccgatgatggctgggcaggtgggcagagaagcacgggtggtttagacgggcaggaccaaagtccatctgtacttaccagggatggaaaccccctggcaccaccgtgtgttttcccttggg

SEQ ID NO: 37890 - DNA, 497 bp, Homo sapiens
  misc_feature (1)...(497): n = A,T,C or G
gccccccatcgannccctatagtaganccctagtcagngtggtggaattcgacgagggatacgaaggtcagaaagaatttcagaccttaaaatgtggtatagaatgctctgcttccatggaaaggtttcctaaaaagccatttatttctctagctcccaaataggagcatcttttgtcccatacccttaaattctttaaggatcctacttcctatttagtgattttccttagagggtaccgtgagagctaaagtcctctttatggcttataaggtgctgcatgatatgcctgctcttccattgttttgggggagtataagaatatttctgagtattttagaggaactgcatgttagatcatttaacgtttcttttcccatcatgtctgaaatgtgtaagaggagtggtgatattaagatttgtttcagaaatcacaggaacatgaatgacagatgttacttctctatttttttttaatattagcaatcctaacagag

SEQ ID NO: 37891 - DNA, 566 bp, Homo sapiens
  misc_feature (1)...(566): n = A,T,C or G
ctgcgctgccgcccgatccacgtgggtttgcgcgcgacaacaattattcttaccttctccccccccccccccgggccccnaatagaaacctcttagagnggcgtggaaccnccccaggagagncgcgggcaagcctaacccaaggcacctcaaaggctccacctgcgggttctgtctcattggtgacaactttggaagagcacaggtctgcaagtgacccgacccacttatctaggtaggaagccagacactgcccacatgactctagcaccctggcttctgctctgactttactgcagatagtcatccatctgtcaggtggcggtcagtctcagaatactgattccgtggaagagcaggttgatttaagtcagcttctccttgattctaaaagcatgcggtagtcaaccacctccaattccgccaatctgttgcccccatcatttgtctctgacaatacttggtgtttttccctggttttctgtcactggcacaggagggtacagttgggagagtgcgttcctggagctcaggcctgcatttgttcacgtgcctcacagcaggcc

SEQ ID NO: 37892 - DNA, 495 bp, Homo sapiens
  misc_feature (1)...(495): n = A,T,C or G
gccccccccccgccggcccnnaattgagncccaactgatgacactagtccagngcggnggaattccgcgcggctccgccggggttccaagaggagctagtaggttcggtgggggccctggcatggacatgcacagcgctcggcttgacagcttccttagccagctccgctgggaactgttgtgtggtcgggacacaggctcaccctcaatgcctggtcccctgcagccaacctcccaaactggcccagatgtgcagcccagccaccagcttatggcctcgggtgccttggaagaggactcagtctgctgtgtggaggaggaggaacaggaggaggaggaagcactggtgacagaagacagggatgcagccttgggaggccccagggagcatgccctggactgggactctggcttctcggaggtgtcaggcagcacatggcgagaggaagaactgcctgtatntcancgcccagcaccctcagcacagtcccttcg

SEQ ID NO: 37893 - DNA, 509 bp, Homo sapiens
  misc_feature (1)...(509): n = A,T,C or G
aatttgattnccccttgcanngggcggnnnnnaactgatgaccntgtgaagngngcnggaattcggnggactgaagggtacgtggggcgaaacaaaaccggccatggcagcagcggaggaggaggacgggggccccgaagggccaaatcgcgagcggggcggggcgggcgcgaccttcgaatgtaatatatgtttggagactgctcgggaagctgtggtcagtgtgtgtggccacctgtactgttggccatgtcttcatcagtggctggagacacggccagaacggcaagagtgtccagtatgtaaagctgggatcagcagagagaaggttgtcccgctttatgggcgagggagccagaagccccaggatcccagattaaaaactccaccccgcccccagggccagagaccagctccagagagcagagggggattccagccatttggtgataccgggggcttccacttctcatttggagttggagcttttccctttggctttttcacca

SEQ ID NO: 37894 - DNA, 484 bp, Homo sapiens
  misc_feature (1)...(484): n = A,T,C or G
cgtggacctgagaccttgacagcgtcgggaannccccgacctgctcgcagcaccctgctgtcttcccggaccggcccgctgcccgcggcgccagcaccatgctcttctattcttttttcaagtcccttgcgggcgaggatgtggtcgtggaactaaagaatgacctgagcatctgtggaaccctccattctgtggatcagcatctcaacatcaaactaactgacatcagtgtcacagaccctgagaaataccctcacatgttatcagggaagaactgcttcattcggggctcagtggtccgatacgtgcagctgccagcacatgaggtccacacacagttgctacaggatgcggtaaggaaggaagccctgcagcacaaacagtgatggctcctcctcctcttcccctccctctttcattggtgacccataaccccaagtgccagcccagaacccctaacccccaatacttgaaggtgttgtgg

SEQ ID NO: 37895 - DNA, 491 bp, Homo sapiens
  misc_feature (1)...(491): n = A,T,C or G
cgcggggttttgaaaccatcgtagaccactatnccgngtggtggaattcgttgtaaggtggctgctgtataacgtccactctctttcatatttaatatgtgtgattgttactgttgtctttttgttttaaaggaaccataagaggagatgatctgagttatatttattgatcagaggaatagagtgcagtaaaactcatactggcatttcgcttttctcatttccctgtaaatgggcgggtattaatccattcccaccttctaatgtccttgatgtccagctggctttgtgggtgtgcaatggttttactgtactgcctcgatctgtgccaggcatttatacacagccacatgtgcgagtcaggtagagcgtatgtggtcacccccatggctcacggagttagctgaatggcctctccgctgtccctagatggcagaaacggtggacacaagcgaaatggtcaacggcgctacagaacaaaggacgagctc

SEQ ID NO: 37896 - DNA, 485 bp, Homo sapiens
  misc_feature (1)...(485): n = A,T,C or G
agcttcaactagacatcgatagcntccggaannccgcccatctgcccccactcgctgtccttccggcccatcgnggtccccgcaggggtcgtgctgaagatcatgctgtcacctgaagcaaggaacacagcatgggtgtcctttgatggacggaagagacaagagatccgccatggagacagcatcagcatcactacctcatgctacccactcccctccatctgtgtgcgggaccccgtgagcgactggtttgagagcctcgcccagtgcctgcattggaacgtccggaagaagcaagcccacttctaggaggaggaggaggaggaggaggaggagggctaggtcaagcccctatccaggcccgaatccttccgctgccctccaagcgccctctggggacagaccaatctgcgtgtgtctgtgaccgcctgtctcagtggcacggccacttcctttctgtagctgggttagagcctgggtctgcg

SEQ ID NO: 37897 - DNA, 487 bp, Homo sapiens
  misc_feature (1)...(487): n = A,T,C or G
agcggaattgagccatcgatnancctagtccangnggtggaattccctgttcacacaacccctgtggactgcagcctcgctctttccaccctgttatggcttctgtgaggcccattttcccttttccccagctgatgaggagccggccccctcagttcccacttgcttgggttcctgggggttttctgatcactggtgcgcattgatgtacatattttcctccagtctggggaggagagagactggaaacgttcctggactgctgaagaggagacccagttggcttcactttttgagaagattcgccctgtaccccaaacccctttccagtattacccttaatgcttgagaacctaaagctggttatcctggcgaacacccctacccttctattgcgggtccccacatgcacacagaactctgacacaggatcagctgcacttaagaaatcatcccagctaagttcattattcctcatggggtgggg

SEQ ID NO: 37898 - DNA, 495 bp, Homo sapiens
  misc_feature (1)...(495): n = A,T,C or G
aaatagatnaaccttctgcaagnggcggaattcgatgaattcactttagctgacggctggagctgggcttttcagagatcgggcatccctggtctctcagggccagttggaggttcccaggaggcatgttcttgatgcctgtggctgcctgaatccaattaactgaattctgaagagtgcatggggtaactgtctcagcctttctcctgtctctgcctctgtcctctgctccaaatcataaaatctcagagctagaagcactttcaagatcattccatccagcgcattcaatttgcaagtttaggcgttgagttccagagagggatggtagcttgctgaggtcccagtcaagcacacttgccattgcctcagctttcccctaaacacggtgtctgtggtcagggttggtgaggaggagctttcctgttttgcctctccttcttcccattggctacacccatctctggccctgctgataccgattcccctgacatt

SEQ ID NO: 37899 - DNA, 506 bp, Homo sapiens
  misc_feature (1)...(506): n = A,T,C or G
caatagaaatagccttcgcangngccgnnnnnnaactgagatccntatgcagagngccggaattctggaactctgccacctgcgtgcaacccacagcttaagtaaattcaaagacactactgccctgattactccgtaggatgtggccaaaacagcatcgaaggcttcttctcttgctttccccaagacagagtcctgaacctgctaaatcaagccattggattttactctgttctgtttacagtttactatttaaggctttataaatgtcaatatattgtgtatatttttctatgagaagcacttcatagggagaagcacttatgacaaggctatattttaaaccgcggtattatcctaatttaaaagaagatcgggccttaataatcccttattctcataggatgaagtcagagaaaatattgagctgcacacacgaagtctgggtttttctgcccaacttccccctggaaggtgtactttgtgttgaccaatgtgtagccagt

SEQ ID NO: 37900 - DNA, 506 bp, Homo sapiens
  misc_feature (1)...(506): n = A,T,C or G
cattgataagccctcgcaagngcccgnnnnnaactgagatccntgtgcagagtgcnggaattcggcgtgggttctcactatgttgcttaagctggtccagaactcaagccagtctctcacttcagcctcttgagtcgttgggattacagaagccaccatgtccaactctcaactctgcttctcttcttactaaggaaagagatcaaggggattcttgtgagcaaggttcttcctggtacctgattgggcaactggatgaagaagagggaaaggaaaaagctgcctgagccccccaagacatcaggtgccctccttatggtgactgcagagatcctgggaagagtcaaaggttattcaaatccagactggacccaaaggggttcacagagaggcaggagaccgcttggaaaagagacaagatcttgttgcccaggctggtctcaaactcctgcgttcaaatgatactctcgccttggcctccaaaagtgttgggattgcagacctgn

SEQ ID NO: 37901 - DNA, 499 bp, Homo sapiens
  misc_feature (1)...(499): n = A,T,C or G
ccattggagnaagccctctgcagagnggcggaattcggtagacgacctctcgcgagngcaaagggaactagggtacccacgcgtttgtgttttttatttaaactttggctaagttttgctaggagcgttttgcctttttttctcagaccttctactcctgtcgttctcccctaagttctgggcatgtggcttcttctctacctaccagggtagcctgtcattgctttaaaggacaaaatgaaatccctgatgggcaaaatatgtcccccctcttcccccagcttttggtcggctttgctcacccaccaacagctaggagctggaaggctcagaagagctggggtgggcatgggagagacagaggaaccccggtggctggaaacacagttccttcccagggtctcttcagcttgctggttggacctcttagcctgcttatgaagcctgaattgacatcatgccaactggtctcctgctgataagtgattccttaacttcn

SEQ ID NO: 37902 - DNA, 489 bp, Homo sapiens
  misc_feature (1)...(489): n = A,T,C or G
agcggggattganccactgatgaccctagtccangtcgtggaattcgcaccattagcaacttggtttttgtacttcagaccttttaaagcacatttgactggacaggatggctcgcgcctgtaatcccagcactttgggatgccgagttggatgaatcgcttgagttcagtagtttgtgaccagctttggcggcggggcggaatcccatctctaccaaaaatgcagagggttggctgggcgtggtggcgtgcgcctgtggtcccggctgcttggggggctggggggggaggatggcttgagcccggatggcataggttgcggcgagctgggattgtaccactgaaccccagcctggacaacatagtgagacccagtctctaaaaaaaatatgaaaacaaccccaacccacaaacggccttttatggcccactggccgggccccccaaaaaactgtggcatttggggctgggatttttcttgcacgggan

SEQ ID NO: 37903 - DNA, 494 bp, Homo sapiens
  misc_feature (1)...(494): n = A,T,C or G
nactcgaaanccttgtgcangnggcggaattcagtgaactcacttgtaggaagatggctctgcagatccctggaggcttttgggcagcagctgtgaccgtgatgctggtgatgctgagcaccccagtggctgaggccagagactttcccaaggatttcttggtccagtttaagggcatgtgctacttcaccaacgggacagagcgcgtgcggggtgtggccagatacatctataaccgcgaggagtacgggcgcttcgacagcgacgttggggagttccaggcggtgaccgagctggggcggagcatcgaggactggaacaactataaggacttcttggagcaggagcgggccgcggtggacaaggtgtgcagacacaactacgaggcggagctacgcacgaccttgcagcggcaagtggagcccacagtgaccatctccccatccaggacagaggccctcaaccaccacaacctgctggtctgctcagtgaca

SEQ ID NO: 37904 - DNA, 509 bp, Homo sapiens
  misc_feature (1)...(509): n = A,T,C or G
gaggtacaattagataccctangcanngtttgatgaacactagtccagagtggtggaattccagaagccgcctccacacacctctcctgtctgtgctcctcgtggcatctcctgatgctcctgggctcaccccccttccagcggctggtcccgctttcctggaatttggcctgggcgtatgcagaggccgcctccacacccctctcccaggggcttggtggcagcataacccccacccctgcggcctttgctcacgggtggccctgcccacccctggcacaaccaaaatcccactgatgcccatcatgccctcagacccttctgggctctgcccgctgggggcctgaaaacattcctggaggacactcccatcagaacctggcagccccaaaactggtgtcagcctcaaggcaggagttccactcctccagggctctgctcgacaggggctgggagatgttcctggaggaggacactcccatcaaaacttggcagccttgcagttggcg

SEQ ID NO: 37905 - DNA, 488 bp, Homo sapiens
  misc_feature (1)...(488): n = A,T,C or G
agggtcccnnatcgagaccctatcgatgtgcgtgaattcgacgagggatacgaagggcagaaagaatttcagaccttagaatgtggtatagaatgctctgcttccatggaaaggtttcctaaaaagccatttatttctctagctcccaaataggagcatcttttgtcccatacccttaaattctttaaggatcctacttcctatttagtgattttgcttagagggtaccgtgagagctaaagtcctctttatggcttataaggtgctgcatgatatgcctgctcttccattgttttgggggagtataagaatatttctgagtattttagaggaactgcgtgttagatcatttaacgtttcttttcccatcatgtctgaaatgtgtacgaggagtggcgatattaagatttgtttcagaaatcacaggaacatgaatgacagaagttacttctctatttttttttaatattagcaatcctaacagattt

SEQ ID NO: 37906 - DNA, 492 bp, Homo sapiens
  misc_feature (1)...(492): n = A,T,C or G
agggggccnattaggggcctttcgtagaccctaggccangncgnggaattcaggaggagctgctggggagcagcgggggcgctcctcctgaggagcctcctaaggaagggaacccggcagagatcaacgtggagcgggatgagaagttgattaaggtcttggacaagctcctcctttacctgcgcatcgtgcattccttggattattacaacacctgtgagtaccccaacgaggacgagatgcccaatcgctgtgggatcatccacgttcgggggcccatgccacccaaccgcatcagtcacggggaagtgctggagtggcagaagacttttgaggagaagctcacgccgttgctgagtgtgcgggagtcactctcagaggaagaggcccagaagatggggcgcaaagacccagagcaggaagtggagaagttcgtcacctccaacacgcaggaactgggcaaggataagtggctgtgtcctctcagtggcn

SEQ ID NO: 37907 - DNA, 492 bp, Homo sapiens
atggtcccccattcgagaccatagtcgagagacgtggaattcgcgtcctcgtggaagtgacatcgtctttaaaccctgcgtggcaatccctgacgcaccgccgtgatgcccagggaagacagggcgacctggaagtccaactacttccttaagatcatccaactattggatgattatccgaaatgtttcattgtgggagcagacaatgtgggctccaagcagatgcagcagatccgcatgtcccttcgcgggaaggctgtggtgctgatgggcaagaacaccatgatgcgcaaggccatccgagggcacctggaaaacaacccagctctggagaaactgctgcctcatatccgggggaatgtgggctttgtgttcaccaaggaggacctcactgagatcagggacatgttgctggccaataaggtgccagctgctgcccgtgctggtgccattgccccatgtgaagtcactgtgccagcccagaacactggt

SEQ ID NO: 37908 - DNA, 486 bp, Homo sapiens
  misc_feature (1)...(486): n = A,T,C or G
agggccccttatgagacccatagaggacgtgaanncgcggcngagccaggggtcctgcgacgctgggcttccgtgagcggcgctctgccagatttctggaccgttttcgtcccattctcgtcctcatggtggacaagagactggtggtggttttcggaggcacaggtgcccagggtggctccgtggcccgcacactcctggaagatgggacattcaaggttcgagtggtgacccgaaaccctatgaagaaggcagcaaacgagctgaggctgcaaggtgcagaagtagtgcagggagaccaagatgaccacgtcatcatggagctggccctgaatggggcttacgccaccttcatcgtgaccaattactgtgagagctgcatacaagagcaagaggtcaagcaagggaagctgctcgctgatctggccaggcagcctgggccttcactatgtggtctacagcggcctggagaacatcaagaagctg

SEQ ID NO: 37909 - DNA, 445 bp, Homo sapiens
ccggtggggaggggacgggcttctctactctgcctcccaggaccgcaccatcaaagtctggagagctcatgacggtgtgctgtgccggactctgcaaggccacggccactgggtgaacaccatggccctcagcactgactatgccctgcgcactggggcctttgaacctgctgaggcctcagttaatccccaagacctccaaggatccttgcaggagttgaaggagagggctctgagccgatacaacctcgtgcggggccagggtccagagaggctggtgtctggctccgacgacttcaccttattcctgtggtccccagcagaggacaaaaagcctctcactcggatgacaggacaccaagctctcatcaaccaggtgctcttctctcctgactcccgcatcgtggctagtgcctcctttgacaagtccatcaagctgtgggaa

SEQ ID NO: 37910 - DNA, 486 bp, Homo sapiens
agcgggaatcgagacatagaccagcgggggaattccgacattcgctttgtctgggagaagaatgggcgagctctggagacctgtgtccctgtgcagacccatgcactgcccgatggcagggcccatgcactcagctggctgcaggacgccatcagggaaagcgctgagtatcgctgctctgtcctctcctcagcagggaacaagacttcgaaggtgcaggttgctgtgatgagacctgaagtgacccaccaggagaggtggaccagagagctctctgcctggagggctgtggctggggagcacgaccggatgatgcagagctggaggaaggcgtgggaaagctgtagcaaggacaccctgtagccaccaggaaggagtccctgacaccgacctcaaccccaacaagaccctgctgccactgaccacagccacccccggagaaggcctggtcccccacaactgtgaactgtcttgcccaagcctgct

SEQ ID NO: 37911 - DNA, 491 bp, Homo sapiens
  misc_feature (1)...(491): n = A,T,C or G
ggcccctttgggccatggagactctaggccangnggtggaattcctaaaaatggcctttcctgaactcccagagtctgagctcgtgccattcctcaccaggaactacctcaaacaaggcttcatggaaaagactgggccaaagcagaaagaacctttcaagaaaaggtggttcgccctggattgccatgagcggaggctgctctattacaagaacccactggatgccttcgagcagggccaggtttttcttgggaacaaggagcagggatatgaagcctacgaagacctgcccaagggcatccgaggaaatcgctggaaagccggactcaccattgtcaccccagagcggagatttgtcctcacttgccccagtgagaaggaacagcaggaatggctggaaagtttgcggggtgtcctgtccagccccttgacgcccctcaaccggcttactgcatcaacagagagtggccgcagcagcaggtgacccatt

SEQ ID NO: 37912 - DNA, 492 bp, Homo sapiens
  misc_feature (1)...(492): n = A,T,C or G
cggcccatcganccattgatgaccctagtcagngtggnggaattcggaaaccatttaccagagagtgacgggcaaggagctgagatacgagggcctgatgggcaaacccagcatcctcacttaccagtatgccgaggacctgatcaggcgacaggcggagaggcggggctgggccgcccccatccggaagctctatgctgtgggtgataaccctatgtctgacgtatacggcgccaacctgttccaccagtacctgcagaaggcaacgcatgatggggcgccagaactaggggccgggggcacacggcagcaacagccctcagcaagccagagctgcatctccatcctggtgtgtacaggcgtctacaatcccaggaacccacagtccacggagcctgtccttggaggaggggagcctccattccacgggcaccgagacttatgcttcagtccagggctcatggaggcctcccacgtggtgaatgacgtgan

SEQ ID NO: 37913 - DNA, 491 bp, Homo sapiens
  misc_feature (1)...(491): n = A,T,C or G
cgcgcccatcgaaaacatcgagaccactaggccangnggnggaattcccggaccgggcggattggccccttagcgcccgggcgtcggggcggtaaaaggccgccataagggaggcacttgagaaatgtctttcctccaggacccaagtttcttcaccatggggatgtggtccattggtgcaggagccctgggggctgctgccttggcattgctgcttgccaacacagacgtgtttctgtccaagccccacaaagcggccctggagtacctggaggatatagacctgaaaacactggagaaggaaccaacgactttctaagcaaaggagctatgggaaaaaaatggagctgtgattatggccgtgcggaggccacgctgtttcctctgtcgagaggaagctgcggatctgtcctccctgaaaagcatgttggaccagcttggcgtccccctctatgcagtggtaaaggagcacatcatgactgaagtgaagg

SEQ ID NO: 37914 - DNA, 489 bp, Homo sapiens
  misc_feature (1)...(489): n = A,T,C or G
cgagggaatcgagatcatagaccagcgtcgnggaatncccctcatgtcgttggtattctgagggagctgcctggcttctctgcctccagcctttggtgtagccacactttgctgctcctggactccagccagccttcacagaggacgtcccgtgccagattctctcacagcagatcgggagacaggatgctgacatataggaattcagctccacaaagcttcaggcctgaccacagctggccctctaggttgattggtgttgcgggcacagaggtgacagtgtctctgcaggcactcaggaagctgttctaccttggaactccatgcgactatccgactcgaataccagggcatggcaaggcggactgatgccgcccaaccaattatctcacttgttttgcgttctgccatccttgttttttttttaaaaatacacttccctaccccaccgccacacaccttacagttcaaaaggttggtttatttgtt

SEQ ID NO: 37915 - DNA, 497 bp, Homo sapiens
  misc_feature (1)...(497): n = A,T,C or G
acgggccgcaatagatatccnatgcgagngccgtggaattccatggnctacgtcccctcccacctctaccacatgctctttgagctcttcaagaatgccatgagggcgactgtggaaagccatgagtccagcctcattctcccacccatcaaggtcatggtggccttgggtgaggaagatctgtccatcaagatgagtgaccgaggtgggggtgttcccttgaggaagattgagcgactcttcagctacatgtactccacagcacccaccccccagcctggcaccgggggaacgccgctggctggctttggttatgggctccccatttcccgcctctacgccaagtacttccagggagacctgcagctcttctccatggaaggctttgggaccgatgctgtcatctatctcaaggccctgtccacggactcggtggagcgcctgcctgtctacaacaagtcagcctggcgccactaccagaccatccaggaggccgg

SEQ ID NO: 37916 - DNA, 475 bp, Homo sapiens
  misc_feature (1)...(475): n = A,T,C or G
catcgacnccctngatgagnacactagtccanngcggggaantcccccgcggnggcccttcgcaggcgcccgcacctcgggtctaggtggccacgggctgcgcgactgacaactccagaaactttcccaccccgctcggcgcagcaacagggtagcaggaggcaaagtccgcaccactgagttgtacggcggggaattcgctcggcccagaagcaattaaacccactgcaaaggcgtttcttcctgtgacgggaaccaactaactaaggcacgcgactcgttccttctagcaagtcttggcaggacccggcaggggtggccgcggagcctctagatcttggagggagctccccgggacccctctcttcaaaatgagctcttccagctccacatgactctctccctcgaggctaaagaaagcgtttagcaacaaaaggtgctctgatgtcaggctctttgcatggaaatgagcctn

SEQ ID NO: 37917 - DNA, 500 bp, Homo sapiens
  misc_feature (1)...(500): n = A,T,C or G
agtaaatttgagatcatatccangttgtgagaacctggaattattcttttctatatatttagatataaatctttctctgggccgggcgtggtggctcacgccagtaatcccatcactttgggaggctgagacaggcgaatcacgaggtcaggagttcgagaccagcctggccaacatggtgaaaccccgtctctactgaaaatacaaaaaattagctggacacggtggcaggcgcctgtgtgtggcgggcgccagctactcaggaggctgaggcaggagaatcgcttgaacccaggaggcagaggttgcagtgagccaagattgcgccactgcactccagcctatgtgacagtgcgagactctgtctcaaaaaaaaaaaaaaaaaaaaaaaaaatttttatcgggatctggaaacccttattttatggaccctggcaggtgaatttttgaaaaatggtttctagttttaagaggagaaaaactttcgggaatatggcttg

SEQ ID NO: 37918 - DNA, 487 bp, Homo sapiens
agcgggaatcgagatcatagaccagcgtggtggaattccatgagtctggttactacagccaggctccagcccaggttcaccagttcccctcttcttgtgagactggtccaggcagcccttctggacactgcatgatcacaggagcagccctctggcccataatgacagccctgtcttcgcaggtggccactcgggcccgcagccgctgggtaagggtgatgcctagcctggcttattgcaccttccttttggcggttggcttgtcgcgaatcttcatcttagcacatttccctcaccaggtgctggctggcctaataactggcgctgtcctgggctggctgatgactccccgagtgcctatggagcgggagctaagcttctatgggttgactgcactggccctcatgctaggcaccagcctcatctattggaccctctttacactgggcctggatctttcttggtccatcagcctagccttcaagtg

SEQ ID NO: 37919 - DNA, 490 bp, Homo sapiens
  misc_feature (1)...(490): n = A,T,C or G
agcgcccatcgagnccatcgtagaccactaggcagngtggtggaattccggggagtggcctgtacagcaacctccagcagtacgatctcccgtaccccgaggccatttttgaactcccattcttctttcacaaccccaagccctttttcactttggccaaggagctgtaccctggaaactacaagcccaacgtcactcactactttctccggctgcttcatgacaaggggctgcttctgcggctctacacgcagaacatcgatgggcttgagagaggctgacgtgatggcagacagggttccccgctgcccggtctgcaccggcgttgtgaagcccgacattgtgttctttggggagccgctgccccagaggttcttgctgcatgtggttgatttccccatggcagatctgctgctcatccttgggacctccctggaggtggagccttttgccagcttgaccgaggccgtgcggagctcagttccccgac

SEQ ID NO: 37920 - DNA, 489 bp, Homo sapiens
aggcgggaatcgagatcatagaccagcgcggtggaattcggcctaatagctgaatgaaatacctgtctgctcagtagaaccttgcaggtgctgtagcaggcgcaagaccgtagatctcaggcctctaacacttccaactccagccaccactttcctgtgcattttcactcctgagaagtgctcccctaactcagatcccctaacttagatttggcccccaactccatttcctgtctgtcttagacagcccttccaactgtgtcatctcttctctggaggtcaatggtggagggagatgcctgggtcctgttcttcctacataaaatgcaagaaaacagcatggccagtaaactgagcaagggccttggaatccttgagaatcacatttatgtgcttatgattacgggcaagctaattaaccttgttgaatctcagattccccatttgcaacattaggttaagaccagtactgcaggattgttgcactaa

SEQ ID NO: 37921 - DNA, 443 bp, Homo sapiens
gcacgatggtgcctgtgttctgtgaatgtgtccatatgtgtctgtaagagagacagagaccaagaacttgcccaattttagaaatacactaatgtgcagttgttgccttttgtctgtattgaaggcccattgaatgactaatccaggctggaagcattcccatgtgggtgtctgagtccatgagccaagcctgaggggacagtgagtctccaggtctgccacactggtgcaccttgctggcacggtgcctcaggaaggtggcgactcaggtgggccttgagttatattttaactcagctgctcagttcccagggcacatttctggatcagaacccatgggaaacaggaggtactaagtgcaatgtcttatcattctgcaaaatggagatctgttgtccagcggcttatctcctttttagtaacccttctttctgaacccaggg

SEQ ID NO: 37922 - DNA, 497 bp, Homo sapiens
  misc_feature (1)...(497): n = A,T,C or G
agagttncccggggcggccccccaactgatgaccnnatagaagaccgctcggaannccnccagacaatctgaaccaaatctgccttcctaaccgtcagcatgtggtatatggtccctggaacctaccacagtccagctactcccacctcactcgccagggtgagaccctcaatttcctggagattggatattcccgctgctgccactgccgcagccacacaaaccgcctagagtgtgccaaacttgtgtgggaggaagcaatgagccgattctgtgaggccgagttctcggtcaagacccgaccccactggtgctgcacgcggcagggggaggctcggttctcctgcttccaggaggaagctccccagccacactaccagctccgggcctgccccagccatcagcctgatatttcctcgggtcttgagctgcctttccctcctggggtgcccacattggacaatatcaagaacatctgccacctgaggcgcttccgc

SEQ ID NO: 37923 - DNA, 495 bp, Homo sapiens
  misc_feature (1)...(495): n = A,T,C or G
gagatggccnattcgagaccctagtccagngttgtggaatcctgcggatttggagggaccctacgaaccaggagtcaggcgagccgatctggggctgcaggatgttccgctgggagcgctccattcccctgcgaggctcggccgccgccctgtgcaacaacctcagtgtgctgcagctgccggctcgcaacctcacgtattttggcgtggttcatggaccaagcgcccagcttctcagcgctgctcctgagggtgtgcccttggcccagcgccagctccacgctaaggagggtgctggagtgagtcccccacttatcactcaggtccactggtgtgtcctccccttccgagtgctgctggtactcacctcacatcgaggaatacagatgtacgagtccaatggctacaccatggtctactggcatgcactggactctggagatgcctccccagtacaggctgtgtttgcccggggaattgctgccagtggccact

SEQ ID NO: 37924 - DNA, 438 bp, Homo sapiens
caggctggagtacagtggcgcgatctcggctcactgcaatctccgcctcccaggttcaagcgattctcctgcctcagcctcccgagtagctgggatgacaggtgcatgccaccatgccctgctaattttttgtatttttagtagagacggggtttcactgtgttagccaggatggtctccgtctcctgacctcgtgatccgcccgcctcagcctcccaaagtgctgggattacaggcgtgagccactgcacccgggctagcctgactttttttgtaaatagtgaatcctcgttattagttagttcttccattgtaaaagtgaaatattgtcttgttaggtataactccctctttagactttccatgtaaaactcttcatgtaaaaacgtgtgcagatagacgagattaaagttgccacggcgtgatgaatgcctggcg

SEQ ID NO: 37925 - DNA, 489 bp, Homo sapiens
  misc_feature (1)...(489): n = A,T,C or G
naactgatccctgtgagnggcngaatnctgaaagccctctctggccacgtggcaaagaaaggaaaagctttttcaggagaggaattcaagcagagtgtggaggaaccacttcttagagatatttgcgtgtttgaaaatgagccgagaggtgatgaccaagccaatggaatgatgaccttcatgacagcccctcccatcacaggccctgaggcctaagggaacgaaatggttttgtgggccaggcccagggccccacttccctatacagcctcagggcagtgctccccacatggcatcccagcagctccagctccagcctcagctcacaggggcccaggtacagctcaggctgccactttggaggttgcaagctgtaagccttgacagctttcacatggcattaagcctgtgggtgcgcagaatgcaagagtgaaggcttggcagcctctgtctcgatttcagaggatgtatgagaaagcccaagttccc

SEQ ID NO: 37926 - DNA, 495 bp, Homo sapiens
  misc_feature (1)...(495): n = A,T,C or G
aatagaattacctccggannnncncnnanactgagaatcctggccagngncgnggaattcctaaaagtttgtcaatctaaaaccaacccctagttgtaatatattggcaagtttatatactcttgtttacttgagacttaattcagcccatcctagcctctccttactgaaatagttcaagcattacattacaggaaaatgtgaaaaaaggtgtcttgctttagattccagaggaaggctgtggtggtatgcagtaagcacgcagcaggtgtatgtgtgtacacttggttacactgtggcatgccggggaggaggggacggggtcatatctcaagctgcctgtgggctgtgggtctgtactgtgactcangaccagagcactccttactcctggcagccttataaagtcatgccattgatcatgattgaggactgggcgggaaagccctccctctgcaatctttcacactacnactctaaaataactcagtgcag

SEQ ID NO: 37927 - DNA, 502 bp, Homo sapiens
  misc_feature (1)...(502): n = A,T,C or G
agatgtctcnnnnnagnnncccccccaatagagnantcctaggttagtagcgccgtaagncanacagccacttcaggtgaccaaggatctgggccgctggaagcctgcagatgacctcctgctcataaatgctgtgttgcagaccaacgacctgacctccgtccacctgggcgtgaaattcagctgccgcttcacccttcgggaggtccaggagcgttggtacgccctgctctacgatcctgtcatctccaagttggcctgtcaggccatgaggcagctgcacccagaggctattgcagccatccagagcaaggccctgtttagcaaggctgaggagcagctgctgagcaaagtgggatcgaccagccagcccaccttggagaccttccaggacctgctgcacagacaccctgatgccttctacctggcccgtaccgcgaaggccctgcaggcccactggcagctcatgaagcagtattacctgctggaggaccagacagcc

SEQ ID NO: 37928 - DNA, 475 bp, Homo sapiens
  misc_feature (1)...(475): n = A,T,C or G
cactggagaccantggttagagcgccgtaagnncgggcatatctgcaatctgccattgagaactggctctgtggatattattgtaacagatttgccatttggaaaaaggatgggatccaagaagagaaactggaacctttatccagcttgcctacgggagatgagccgtgtctgcacacctaccacaggccgagctgtactacttactcaagacacaaaatgctttaccaaggcgttatctggaatgcgacacgtatggcgaaaggtggatacagtctgggtgaacgttggtggtcttcgtgctgcagtttacgttctgatacgtacacctcaagcttttgttcatccttcagaacaagacggagaaagaggaactctttggcaatgcgcagaatgaagatgactaatagtacttgtacttcccaccactggaaatgttagcataaaagaacttggagaggagaaagtattaacc

SEQ ID NO: 37929 - DNA, 489 bp, Homo sapiens
  misc_feature (1)...(489): n = A,T,C or G
cgcgccatcgaaaccttgaanccttcngaangccgaggacccacggctctttacactcacggccctgcgacggcggggcttcccacctgatgccatcaacaacttctgtgcccgggtgggagtgactgtggcacaaaccacaatggagccacatcttctagaagcctgtgtgcgtgatgtgctgaatgacacagccccacgagccatggctgtgctggagtcactacgggtcatcatcaccaactttcctgctgccaagtccttggacatccaggtgcccaacttcccagctgatgagaccaaaggcttccatcaggttccctttgcacccattgtcttcattgagaggactgacttcaaggaggagccagagccaggatttaagcgcctggcttgnggccagcctgtgggcctgaggcatacaggctacgtcattgagctgcagcatgttgtcaagggccccagtggttgtgtagagagtctggaggg

SEQ ID NO: 37930 - DNA, 501 bp, Homo sapiens
  misc_feature (1)...(501): n = A,T,C or G
agccccattagannccntnnnnnnnnttgatntncctagtcagtgtggtggaattccaggatcaccctccacatcacagatgcctcagatatgaccagagacctcctcaagtctgagacttgcagtgtggaaatcccagagctagaatttgaactgggaatggcagtcctcgggggcaagttcaccacactggaagggctgctgaaagacatccgggaactggtgaccaaaaatcctttcacactgggcgacagttccaatcctggacagacggagagactacaggagtttagccagaagatggaccagatcatcgaaggtaacatgaaggcccactttattatggatgatccagcaggaaacagttacttgcagaatgtgtatgcgcctgaagatgatcctgagatgaaggtggagcgttacaagcgcacctttgaccaaaatgaggagctagggctcaatgacatgaagacagagggctatgaggcaggcctggctccg

SEQ ID NO: 37931 - DNA, 490 bp, Homo sapiens
agggggaatcgagaccatagagcagcgttgtggaatgctgccggagtccgcggcggcggaggcggctgcggcgagcaaggaggctgacgacgcacaatgcaaagacggcttttcagagcagccagtggggcaggacaatgtttttcatcaaatgtccttagatttggaggaggtttccccagtgtatccagtggttgtcttcctcttgattaatattaaaggaggagaaaaagtgtgtattggggtcagtgcagaaaacaaatcatccaagcacacgaagtggaatttgctaatagcattactactcacccagtgacttcggagtcacaacccaggacacggttttccgcccatttctacagacacagtgagattcttcattcttctctgttggaacagccaggaaagcggaagagacctccagctgcacaacgacctgtcccccacacccaaccacaagtttatgaagggatgcagaacagcatgaata

SEQ ID NO: 37932 - DNA, 442 bp, Homo sapiens
  misc_feature (1)...(442): n = A,T,C or G
ggagtacggccggggcgtcatcccatccaccctggccttcgcgctggccgacactgtcttcagcacccaggacttcctcaccctcttctatactcttcgctcctatgcttggggcctccggcttgagctcaccacctacctctttggccaggacccttgaccagccaggcctgaaggaagacctgcggatggacaggagcgggcaggcccgcacatatccacttgctggagcccatgtttacagacagggacatacaccatgcagatcctgagttcctgctgtatgagcagggatatccatgcttatgtatccaaacacagagacccatgggaacaaatgaaacacatatagatactgagacctgtgtgtacagtaggaccatgcactcacacccatctggagagggagcccccggtataccaagggagccagttgtgttcn

SEQ ID NO: 37933 - DNA, 490 bp, Homo sapiens
aggggaatcgagaccatcgtagagcactagtcagtgtggtggaattcctgcggcttgcgcgcccttgtagacagccggggccttcgtgagaccggtgcaggcctggggtagtctcctgtctggacagagaagagaaaaatgcaggacactggctcagtagtgcctttgcattggtttggctttggctacgcagcactggttgcttctggtgggatcattggctatgtaaaagcaggcagcgtgccgtccctggctgcagggctgctctttggcagtctagccggcctgggtgcttaccagctgtctcaggatccaaggaacgtttgggttttcctagctacatctggtaccttggctggcattatgggaatgaggttctaccactctggaaaattcatgcctgcaggtttaattgcaggtgccagtttgctgatggtcgccaaagttggagttagtatgttcaacagaccccattagcagaagtcatgtt

SEQ ID NO: 37934 - DNA, 485 bp, Homo sapiens
aggggaatcgagacctagagagcgtggtggaattcgcgtggaggaggagcgcgaccactggcagcagttctacttcctgagcacgcggcgccgcaaccttctgcgtaacccgtgtggggaagaggacttggaaggctggtgtgacgtggagcatggtggggacggctggagggtggaggagctgcctggagacagtggggtggagttcacccacgatgagagcgtcaagaagtacttcgcctcctcctttgagtggtgtcgcaaagcacaggtcattgacctgcaggctgagggctactgggaggagctgctggacacgactcagccggccatcgtggtgaaggactggtactcgggccgcagcgacgctggttgcctctacgagctcaccgttaagctactgtccgagcacgagaacgtgctggctgagttcagcagcgggcaggtggcagtgccccaagacagtgacggcggtggctggatgg

SEQ ID NO: 37935 - DNA, 483 bp, Homo sapiens
  misc_feature (1)...(483): n = A,T,C or G
ggcagctccaattgaaaaccctnttttgagaccctaggccagngcggaggaantcgcgtttgcacctcgctgctccagcctctggggcgcattccaaccttccagcctgcgacctgcggagaaaaaaaattacttattttcttgccccatacataccttgaggcgagcaaaaaaattaaattttaaccatgagggaaatcgtgcacatccaggctggtcagtgtggcaaccagatcggtgccaagttctgggaggtgatcagtgatgaacatggcatcgaccccaccggcacctaccacggggacagcgacctgcagctggaccgcatctctgtgtactacaatgaagccacaggtggcaaatatgttcctcgtgccatcctggtggatctagaacctgggaccatggactctgttcgctcaggtcctttttgccagatctttaaaccagacaactttgtatttggtcagtctggggcaggta

SEQ ID NO: 37936 - DNA, 493 bp, Homo sapiens
  misc_feature (1)...(493): n = A,T,C or G
aggcggaatcgagaccatctgagagcactaggcagngcggtggaattcaatgtggtgaagattcaaaagcatgttaccttcaaccaagtgaaaggcattttcggcttcactgacagcgactgcattgggaagatcagttttcctgccatccaggctgctccctccttcagcaactcattcccacagatcttccgagacaggacggatatccagtgccttatcccatgtgccattgaccaggatccttactttagaatgacaagggacgtcgcccccaggatcggctatcctaaaccagccctgttgcactccaccttcttcccagccctgcagggcgcccagaccaaaatgagtgccagcgaccccaactcctccatcttcctcaccgacacggccaagcagatcaaaaccaaggtcaataagcatgcgttttctggagggagagacaccatcgaggagcacaggcagtttgggggcaactgtgatgtggacg

SEQ ID NO: 37937 - DNA, 487 bp, Homo sapiens
  misc_feature (1)...(487): n = A,T,C or G
agtgggaatcgagatcttagtccagcgtggtggaattcgtggcatttgaaactgtccattcaatggatggggcggtgtgcccactggaagagctgtgtgatgtggcccatgagtttggagcaatcaccttcgtggatgaggtccacgcagtggggctttatggggctcgaggcggagggattggggatcgggatggagtcatgccaaaaatggacatcatttctggaacacttggcaaagcctttggttgtgttggagggtacatcgccagcacgagttctctgattgacaccgtacggtcctatgctgctggcttcatcttcaccacctctctgccacccatgctgctggctggagccctggagtctgtgcggatcctgaagagcgctgagggacgggtngcttcccgccagcaccagcgcaacgtcaaactcatgagacagatgctaatggatgccggcctccctgttgtccactgccccagcca

SEQ ID NO: 37938 - DNA, 489 bp, Homo sapiens
  misc_feature (1)...(489): n = A,T,C or G
agggggatcgagatcttagccagcgctgnggaatgcgcctgatggcatcaccgtggaggtcattgtggtcaaccaggtcaatgccgggcacctgttcgtgcagcagcacacacaccctaccttccacgcgctgcgcagcctcgaccagcagatgtacctctgttactctcagcctggaatccccaccttgcccaccccagtggaaataacggtcatctgtgccgcccctggtgcggacggggcctggtggcgagcccaagtggttgcctcctacgaggagaccaacgaagtggagattcgatacgtggactacggcggatataagagggtgaaagtagacgtgctccggcaaatcaggtctgactttgtcaccctgccgtttcagggagcagaagtccttctggacagtgtgatgcccctgtcagacgatgaccagttttcaccggaagcagatgccgccatgagcgagatgacggggaatacagcacn

SEQ ID NO: 37939 - DNA, 493 bp, Homo sapiens
  misc_feature (1)...(493): n = A,T,C or G
acgcgcnaaatcgagatccatagaccagcgtgtgtggaattccatggttttgcacatgttgaatttgagcagctttggtcacagccaggtgtgtcaagcctgaagcttggtcatgggaagggtggtcatgatggtggtgttttgtgtcgtggcacttgcagatggttggagtggacaggggatgtgtaggtgatatgtgcccatctgccagcctttggtggtatcaggccatgtggtcccagtgacggtaggtgtgacctctccccagagcgccccctgcactttgcggagaaggtgctgcccatcctgcacgggctgggcacggacagccacctggtggtgaagaagcaccaggccatggaggccatgctgctgtacctgggtaggtggtgcctgcagggtggccaggctccgggtggtcctctcttccagagccagggtgggacctggtggtgccaggtaggaacagctcagacagagggcgccaagtggg

SEQ ID NO: 37940 - DNA, 494 bp, Homo sapiens
  misc_feature (1)...(494): n = A,T,C or G
caactgaataccctctgcaagngcnggaaaaaatgatgtgcctcgtatagncagangggatagaccgatgcgaacgtggccaagttcttaatcagactcagtgactatctcttcactctagccagatagtgcagccatgaaggaggggaatcaagagaatatatacaagaaaaatgacccatcggccgagtctgagggactctgaaatcacagaatgtgggagcttggaggatccctccatggcgatggccgaggagagaggagcttgcccttctggggtcctggttcctgaagagctcacccaaagaggctcaaagcagacttttgtcccagctcagctttgatctacacctcttgccaccttactcaagggactgtgaccctttggggattctgtccctgaccctgcttgcccaagctctcctgtgtcttggagggatgtgggaatgaattggcattgcaggaaagacaggtgaagtgattgctgcaatgag

SEQ ID NO: 37941 - DNA, 499 bp, Homo sapiens
  misc_feature (1)...(499): n = A,T,C or G
caatagattanccttcgcagngggcggaanncgaagtgactaccgatgccagcgncgcaagacgtgtcggagccaccgcctgagctgctcgggtctcaattcttctcaaaagtcaccgctcagtgaacgcccaggccctcctgtgagtggggaagccgccctgcggttcatctcacagcgcgcagagactgcagcctcccaatcgtgcaggctcgggccttgagtcggtttctgtttctctggagggacagagcagaggggccagggactgagtgagtggctaagcaggggagggtgatgtgaaggtgatctcgagtttgccaggggtgggctgaacaggagaagatgaacaaaggatccggctctcaaaaggccctggcagggactggatgctgggtacagaagcgcgcccttgggcttcaagctcctgagctggcagcacggcagggagagctccatccatgtcgcangagcccaggaagctcagcccctgggtaaa

SEQ ID NO: 37942 - DNA, 438 bp, Homo sapiens
  misc_feature (1)...(438): n = A,T,C or G
aacaacacggttttaaggatggtttctaaagatgaaattaaaaattgctccacatgggttaagtgtctggtggtaaagttgggagaaactggatggatgcacatcgcatggctggtggcgagcccatctctcttctctcgggtgagagaaccgggccaagctgagttgggttgttcactttaatgggtgtccgtttcccctgccacctgtgctgaggacatttcccagcctgagctgggggaggcagcattttctgaagtgtggagttgtctctgtggagactcaagttacagatcttaaggggcctgcctagaattttctcctctgggcaggcgacccangaaagggtttggagtgaggctgtgagcacttacttgatattttacaagtttggatttgggggttaattttttccttggcccgtntttcctggtgact

SEQ ID NO: 37943 - DNA, 499 bp, Homo sapiens
  misc_feature (1)...(499): n = A,T,C or G
aaattgaaanccttgtgcagngngcnggaattccagtatgcgcgtatggagccccgaaccctcctcctgctgctctggggggcagaggccctgaccgagacctgggccggctcccactccatgagggatttctacaccgccatgtcccggcccggccgcggggagccccgcttcatcaccgtgggctacgtggacgacacccagttcgtgaggttcgacagcgacgccacgagtccgaggatggcgccccgggcgccatggatagagcaggaggggccggagtattgggaccgggagacacagatctccaagaccaacacacagacttaccgagagaacctgcgcaccgcgctccgctactacaaccagagcgaggccgggtctcacacttggcagacgatgtatggctgcgacctggggccggacgggcgcctcctccgcgggcataaccagttagcctacgacggcaaggattacatcgccctgaacgaggacctga

SEQ ID NO: 37944 - DNA, 482 bp, Homo sapiens
  misc_feature (1)...(482): n = A,T,C or G
nggggtcatcgagaccntagnatganggcgctagcagccctttcagagcgcactcacacccacatgttatacaaacggcctgccaggagtgacccagcactcgggggtgaagagtcaaggaccctggagccaaatgcctgcgttcgaatcctggctcctcactgattagctgctgtatccccactgcctggaacaaacctggcgcctagtgggttcgttgaatatcactcaatggaatgaattgacgaatggtggcccttgtaccatttcaccatgtccaaactagtgcttagaagaggccattgatttgctgaagcttcataactcagctgtggctacaccctgcctctgtggagacctttccccaagggccattgtccactgtgcatttgcagctgggggcatgtctgggcactgtgcttctagaggtggaggcagcactgggcagacgggtcaaagccaggggcagaagggttcgcatg

SEQ ID NO: 37945 - DNA, 507 bp, Homo sapiens
  misc_feature (1)...(507): n = A,T,C or G
aaactgggatgnnccntccgcgangnngcnnnnnaactgagatccntgtgcagagngccggaattcgtcagggctccccaacctgagttgggttacttcaatggcagccagcaggcctggatggatgcctagaaagcccttgccttccttcctcccacttgtttctccaggcctggttaactcttccgttgtcagcttctcccccttcagcctgtttctgcagcagccagggttctcccccctacaccctctgcaggtggagagagagaagctgggcccagccgggccgtgcctgctggcacagacgccttaacgctgtgtgtatgactgcgtgactgtgtgggagcctggactgacagataggccaagggctactctctggcatctccaggtgttttgtagcaaacagccacttagtgctttgtcctggactccactcagcctcaggatggggaatagccaagaatggcagcctcagcgcacaggcaaggtcagaaagagacggcg

SEQ ID NO: 37946 - DNA, 466 bp, Homo sapiens
  misc_feature (1)...(466): n = A,T,C or G
catgacaccntgttagaggcgtaatncnagcatcctttccccccccggcagaaactgcttgcaagttttcctttttaaaagatagtctttcttcttgtttcctctatcatctagcatattcctctgcagacactattgaagttcatggtggatattgccctgggaatggagtatctgagcaacaggaattttcttcatcgagatttagctgctcgaaactgcatgtaagagtcctcggctatcctggaagggtttggacctcatggtgtttggtctttgcagggttagtgagaggacctgttcctgtttagataggcaaggaagctgcagtcagcgggggatggtgtggcttgctccgaagatggaaatatggctgggtgtttgggagttttcactgcctctgtatctgagagtctggttggcttccaaagctttcccttatgactccagatntaccttcactctt

SEQ ID NO: 37947 - DNA, 493 bp, Homo sapiens
  misc_feature (1)...(493): n = A,T,C or G
aacttgaaancctttgcagggcggaanccaatgaaaacctagaaagcgccgagnagaaattaactttacctctttttgcatggcaatggggccaatcttccttaagctgctccttaaaagaaaaggaatcatactgctaagaattcagacttcagcagacatggggagcattgggaggagcccgaatcactgatggaattgaacagtgcgtggagacggttcagcaggacaaggtccctggctccacctcttctgccacaaacatcagcatggtggtgtctgccagcccttcatccagtgtgagaagacagagatgaacactggagaaatcaacaagaaattgcgcccccagccggcagagaacaaacagcagttcagaaacataaagagaaatttcttgtaactcaagtggcctaattcctggccaaccagcagaagaaataccagtatgaagaattcaaagacctcataaaatctatgctgagggatgagc

SEQ ID NO: 37948 - DNA, 513 bp, Homo sapiens
  misc_feature (1)...(513): n = A,T,C or G
ccattgattacccttcggcangnggcggnnnnncaaactgaaatccntatgcagagngcnggaattcgccggttcccggcccagtcccgtcctgcagcagtctgcctcctctttcaacatgacagatgccgctgtgtccttcgccaaggacttcctggcaggtggagtggccgcagccatctccaagacggcggtagcgcccatcgagcgggtcaagctgctgctgcaggtgcagcatgccagcaagcagatcactgcagataagcaatacaaaggcattatagactgcgtggtccgtattcccaaggagcagggagttctgtccttctggcgcggtaacctggccaatgtcatcagatacttccccacccaggctcttaacttcgccttcaaagataaatacaagcagatcttcctgggtggtgtggacaagagaacccagttttggcgctactttgcagggaatctggcatcgggtggggccgcaggggccacatccctgtgttttgtgtn

SEQ ID NO: 37949 - DNA, 499 bp, Homo sapiens
  misc_feature (1)...(499): n = A,T,C or G
ccgcgccatcgagaccatagtagagcgctaggccagngcggaggaacccgcccaaacgctgaccacacccgctcacctttgatgtcaacaatcccctgcatctggactatgtgatggctgctgccaacctgtttgcccagacctacgggctgacaggctctcaggaccgagctgctgtggccacattcctgcagtctgtgcaggtccccgaattcacccccaagtctggcgtcaagatccatgtttctgaccaggagctgcagagcgccaatgcctctgttgatgacagtcgtctagaggagctcaaagccactctgcccagcccagacaagctccctggattcaagatgtaccccattgactttgagaaggatgatgacagcaactttcatatggatttcatcgtggctgcatccaacctccgggcagaaaactatgacattccttctgcagaccggcacaagagcaagctgattgcagggaagatcatcccagccat

SEQ ID NO: 37950 - DNA, 500 bp, Homo sapiens
cggttccattcgagatcctaggcagagttgtggaatccctgcaggaagagatgaaactctgcagctggtttaaacacctgccagcatccatcgtcgagttccagccaacactccgaacccttgcacatcccatcagtcaggaatacctgaaagacacgctgcagaaatggatccacatgtgtaatgaagacattaaaaatgggatcaccaacctgctcatgtacgtgaagagcatgaagggtctcgcgggaatccgggacgccatgtgggagttacttaccaatgagtccaccaatcacagctgggatgtgctatgtcggcggcttctggagaagccgctcttgttctgggaagatatgatgcagcaactgttccttgaccgattacagactctgacaaaagaaggctttgactccatctccagtagctccaaggagctcttggtttcagctttgcaggaacttgaaagcagcaccagcaactccccttcaaataagcac

SEQ ID NO: 37951 - DNA, 504 bp, Homo sapiens
  misc_feature (1)...(504): n = A,T,C or G
cggttccatccgatatccctacgccagngttgagagaacctctcggcggaccatgcgggatcaggacaccgggaaggagaacgagatggactgggacgactctgccctgaccatcaccgtcaaccccatggagacctatgaggaccagcacagcagtgaggaggaggaggaagaggaagaggaagaggaaagcgaggacggcgaagaagaggatgacatcaccagcgccgagtcggagagcagcgaggaggaggagggggagcagggcgacccccagaacgcaacccggcagcagcagctggagtgggatgactccaccctcagctactgacccgtgcccccggccacctcggtttctgctttcgaagactctgctgccatccgttctcccagtcccaagggtccacgatgtacaaagtcatttcggccagtaggtgtgcagacccctccccgccacgatcgtcgctgtgcttggtgtgtangaccctatgctccccgcccacc

SEQ ID NO: 37952 - DNA, 507 bp, Homo sapiens
  misc_feature (1)...(507): n = A,T,C or G
gtggtcccattttagaccttggcanngtttgatgaccctctgccagagcggtggaattcgtaagccacgcgcaaccaagatgcgaggcatgccctgtgccacacacggactcaccctgctcactgtgcccgtgggatcgaaatgtgcccacgtgtaattcatactggagaggctgctgtcattgaaagaaaagattgttacttgcatttctggagaaaaggagcgcaccaggccacgcagggccacaggaggaggacgcaccagagtggtcaggaggcataactaagcgagcagctttccactgtgtctccatggcaaaggcgaagatgggcggtggcaaagtgtatgattggcaggtttgaatgtcttgggcagtagctacaggagtggtctccaactgcctggtgcctgggcctgggtgatcagggcgaggggatactgccttctgcagtggaagagtcaaatcgaggagatggactctgagttggttagtgtgcaaaggtgcac

SEQ ID NO: 37953 - DNA, 492 bp, Homo sapiens
  misc_feature (1)...(492): n = A,T,C or G
caattgagacccctcgcagngngcnggaactgaggaccctcggcaaagccactagctgtcccttttcctctcctagggtcaggccagggagatagagaagggttggactttaatgtgaggatgctggctctttttctagattttcttgcctaaaaaatgcttaaatcatgttgaccagagataggacctgtagacctctcacccacttttctgcctctggcacttgaaaggtttttcaaggatgtcagcactgtggctgggggaggcgggtcgccctcgccaacctctgctctggggtggggcctggctcttccttgaggcctgcattggccagctccgctgcgagcaccctgcttgtgccctgtgactgcagttcatccatgggaacatccacaagagtggcctcaaggcatccgagtacagcctcccctcacatgccacgggcccctttgtgctgtctggatacagcggctacaagcaggttcaagtccc

SEQ ID NO: 37954 - DNA, 507 bp, Homo sapiens
  misc_feature (1)...(507): n = A,T,C or G
ggggccaagaggggcccaaggcgcnccccaattgaaaacccaactgagaccctaggacanngcgnggaattcctctgactgcctggagctcctttctcttctggggaagtcgtgagcccaagcagggctgtagaggcaggtcattcggtactgggccatcttttgtcccatttctatgattaccgtgacaagggaagtctcgagcttggctgcagccaggatgctgtcttgttatcacgttgcttcataaagaagaatacttggttattcagaatgaaatgctgggaacagaatatctgaatccacatcagtggtctcagaatcactttgttctctggaacatcatagcacatttcttgagaaatacagaaccacatttttgagcttagatctgtcctcggtctcctacaatggttttgtgtgttttagactccagctgacattggagagacggcctaatgtattatgaagtctgtggaaatgcctttggaaaggctgagactcaag

SEQ ID NO: 37955 - DNA, 500 bp, Homo sapiens
  misc_feature (1)...(500): n = A,T,C or G
cccttgatnacccttggcgagagngcnggaanncccctgatagccgtgcgcagaancnggacttggatttcaagcagcctttcctagagttgaatcgaatcctggaagccctgcacgaacaagacctgggtcctgcgttggaatgggccgtctcccacaggcagcgcctgctggaactcaacagctccctggagttcaagctgcaccgactgcacttcatccgcctcttggcaggaggccccgcgaagcagctggaggccctcagctatgctcggcacttccagccctttgctcggctgcaccagcgggagatccaggtgatgatgggcagcctggtgtacctgcggctgggcttggagaagtcaccctactgccacctgctggacagcagccactgggcagagatctgtgagacctttacccgggacgcctgttccctgctggggctttctgtggagtccccccttagcgtcagctttgcctctggctgtgtggcgctg

SEQ ID NO: 37956 - DNA, 503 bp, Homo sapiens
  misc_feature (1)...(503): n = A,T,C or G
ccatagattncccttcgcaanggcggaancgaaaaatgagatccgttttgangngcaatttaccggctgagagatgctcacctcagcacccccagtcagtgcacaaagaggtatgtcatcaccaacccgccctatgagtttgagctcgtgccgacggacctgatcttctgcttaatgcagtttgaccacaatgccggccagtcccgggccagcctgtcccattcctcccactcgtcgcagtcctccagcaagaagagctcctctgttcactccatcccatccacagcaaaccgacagaaccggcccaagtccagggagtcccgggacaaacagaagtacgtgcaggaagagcggctttgatatgtgtatccaccgccactgtgtgaaactgtatctgccactcatttccccagttggtgtttccaacaaagtaactttccctgttttcccctgtagtccccccctttttttttacacatatttgcatatgtatgatagtgtgg

SEQ ID NO: 37957 - DNA, 496 bp, Homo sapiens
  misc_feature (1)...(496): n = A,T,C or G
tggtnccatttgaaccctnnnannttttgatatcctatcagngcgggaattccgtcgtctctatggtggcggcggatttggagggaccctacgaaccaggagtcaggcgagccgatctggggctgcaggatgttccgctgggagcgctccattcccctgcgaggctcggccgccgccctgtgcaacaacctcagtgtgctgcagctgccggctcgcaacctcacgtattttggcgtggttcatggaccaagcgcccagcttctcagcgctgctcctgagggtgtgcccttggcccagcgccagctccacgctaaggagggtgctggagtgagtcccccacttatcactcaggtccactggtgtgtcctccccttccgagtgctgctggtactcacctcacatcgaggaatacagatgtacgagtccaatggctacaccatggtctactggcatgcactggactctggagatgcctccccagtacaggctgtgtttg

SEQ ID NO: 37958 - DNA, 491 bp, Homo sapiens
ggggccccaatcgagatcatatagagagccgtggaattcgtgacctcagatggtcaccatcattcctgtgctcagaggccaacccatcacaggggtgagataggttggggcctgccctaacccgccagcctcctcctctcgggctggatctgggggctagcagtgagtacccgcatggtatcagcctgcctctcccgcccacgccctgctgtctccaggcctatagacgtttctctccaaggccctatcccccaatgttgtcagcagatgcctggacagcacagccacccatctcccattcacatggcccacctcctgcttcccagaggactggccctacgtgctctctctcgtcctacctatcaatgcccagcatggcagaacctgcagcccttggccactgcagatggaaacctctcagtgtcttgacatcaccctacccaggcggtgggtctccaccacagccactttgagtctgtggtccctggagg

SEQ ID NO: 37959 - DNA, 491 bp, Homo sapiens
  misc_feature (1)...(491): n = A,T,C or G
ggggcnccaatcgagatcctatcgagagccgtggaattcgcgcgatgtctcacagaaagttctccgctcccagacatgggtccctcggcttcctgcctcggaagcgcagcagcaggcatcgtgggaaggtgaagagcttccctaaggatgacccgtccaagccggtccacctcacagccttcctgggatacaaggctggcatgactcacatcgtgcgggaagtcgacaggccgggatccaaggtgaacaagaaggaggtggtggaggctgtgaccattgtagagacaccacccatggtggttgtgggcattgtgggctacgtggaaacccctcgaggcctccggaccttcaagactgtctttgctgagcacatcagtgatgaatgcaagaggcgtttctataagaattggcataaatctaagaagaaggcctttaccaagtactgcaagaaatggcaggatgaggatggcaagaagcagctggagaaggan

SEQ ID NO: 37960 - DNA, 446 bp, Homo sapiens
  misc_feature (1)...(446): n = A,T,C or G
ctccatccaaggctggtcaggaacgtcctttgcagggtcggggtggtgcgggagaggctcactttgcctggttagacccaagggctgctaccttttccttggacggctcatgtcaggtcttgcaggatcagtttaatggccacagaaaggaagcaggacagcagggcccctctcacccacaactggaccaggtccaggattctagcagtcctggggcactgacctttgccagctacctgggggagggcttgccactggaaaacctttcaggccgcccccatcagtgggctccaaagtaaatggctgaaaacaaaaatgtttcacttcctaacagttttcctttttccactgtgtgactgaaagctcctatatcattttatatttctgaatctataaaacaaaacaaacaagcctgacagtgtctggaggagccaaaggtggcctcn

SEQ ID NO: 37961 - DNA, 487 bp, Homo sapiens
  misc_feature (1)...(487): n = A,T,C or G
agggggatcgagacattagacagcgtggtggaattcggcagcctggctgtggagtttccacggcgacacacagcctcagtggtgcaagatttaaaattaccttcctttttggctggaagacttagaagccgcctgatcatactttctcattttagagatgaggaaataaagcctacaagtgtgaaattaatttccttacagttttcctagctgatgagggacagaaccagaactagagcctgagcccaacccacatcactattcttctaacccttcctgaagttgtgatgctcatgctgaaatttaagatgccaaatatttttgccagcactttttcagttgggagaatcaccagggtttaaatgtcagatttatttttatgtggatccctgtgtatgctgaactacagagcatgatgtttaatctaatttaaggagccactgattgtaaaacatgccattattttatgttgcactaagaaggtggn

SEQ ID NO: 37962 - DNA, 468 bp, Homo sapiens
  misc_feature (1)...(468): n = A,T,C or G
catcgacaccctaatagtaggcgtaanncanncattagggcatttgatggtatatgcttggagcctactgaacttaggtttgaattttagttctgcttcatgaacttgactttaagcaagtatttaacctttttaaggctatgcaagttgggataatagtgtcttgcacgattgtcctgaagtttacatacatgactatgtaacatctagcactttgctaggtatataaaagtatcaaaatgactactactaaaaaccatctcgggagctgggtacagtagctggtacccataattccagctaattaggaagctgaggcacgaggatagcttgaggccaggagtttgaggccagcctcggcaacatgcaagaccctatctctcagaaaatgtaaagactttaaaattcttgtatatgtggaccacatcataaatagaatgtacttctcacctaattattatgtacgct

SEQ ID NO: 37963 - DNA, 483 bp, Homo sapiens
  misc_feature (1)...(483): n = A,T,C or G
agcaggccttttagaacccccatagagaccactaggccagngcggnggaattcgaggagcagaaatccaaaaagggtcctgatggattggccttgcccaacaactactgtgacttctgcctgggtgactcaaagattaacaagaagacgggacaacccgaggagctggtgtcctgttctgactgtggccgctcagggcatccatcttgcctccaatttacccccgtgatgatggcggcagcgaagacataccgctggcagtgcatcgagtgcaaatgttgcaatatctgcggcacctccgagaatgacgaccagttgctcttctgtgatgactgcgatcgtggctaccacatgtactgtctcaccccgtccatgtctgagccccctgaaggaagttggagctgccacctgtgtctggacctgttgaaagagaaagcttccatctaccagaaccagaactcctcttgatgtggccacccacctg

SEQ ID NO: 37964 - DNA, 497 bp, Homo sapiens
  misc_feature (1)...(497): n = A,T,C or G
agcncncattcgataccctcnnnannntttgatatccctagtcagtgtggnggaattcccagaggcaggttcagagccctagggaagacaacttcccataagtgaatatcgattagttaataacaatattagtagtaagttattatataattagtaaatattgaacattattatgtgccaggtaccattctaagcactttataagcaatatccctttgattcttcataataacttcgtgaggcaaatactactattatgtctattttccaaatgaagaaagtgaggcattaaaaagttaattgaccaaggtcaacaaagctaagtggggcactggatttgacttcaagtaggggcccttgctcttaattacagtactaagacatactgcctctcaatttagaagcaaataagtaataaaatggtactttatctcaatggtttgaaacaacagtttaagcttttgctttaaatgtaagttggttaaataaatgtaagn

SEQ ID NO: 37965 - DNA, 491 bp, Homo sapiens
  misc_feature (1)...(491): n = A,T,C or G
aggatccccnttcgagaccatgttgagtgtgctggaattcggacagtgaagatgtttggatggttgagttctatgctccttggtgtggacactgcaaaaacctagagccagagtgggctgccgcagcttcagaagtaaaagagcagacgaaaggaaaagtgaaactggcagctgtggatgctacagtcaatcaggttctggcctcccgatacgggattagaggatttcctacaatcaagatatttcagaaaggcgagtctcctgtggattatgacggtgggcggacaagatccgacatcgtgtcccgggcccttgatttgttttctgataacgccccacctcctgagctgcttgagattatcaacgaggacattgccaagaggacgtgtgaggagcaccagctctgtgttgtggctgtgctgccccatatccttgatactggagctgcaggcagaaattcttatctggaagttcttctgaagttggcagac

SEQ ID NO: 37966 - DNA, 487 bp, Homo sapiens
  misc_feature (1)...(487): n = A,T,C or G
aggggnaattggagacatagacagcgtcgggaannacaaggaccagngggaggacctgactcccctcacctttggggtgcaggaactcaacctgactggcttcttctggaatgactcctttgccaggctctcactgacctatgaacgactctttggtaccacagtgacattcaagttcattctggccaaccgcctctacccagtgtctgcccggcactggtttaccatggagcgcctcgaagtccacagcaatggctccgtcgcctacttcaatgcttcccaggtcacagggcccagcatctactccttccactgcgagtatgtcagcagcctgagcaagaagggtagtctcctcgtggcccgcacgcagccctctccctggcagatgatgcttcaggacttccagatccaggctttcaacgtaatgggggagcagttctcctacgccagcgactgtgccagcttcttctccccggcatctggatgg

SEQ ID NO: 37967 - DNA, 495 bp, Homo sapiens
  misc_feature (1)...(495): n = A,T,C or G
aggaggccnnttagannccctattgtagtccctagtccangnggnggaattcgcgcggcgtgagaagccatgagcagcaaagtctctcgcgacaccctgtacgaggcggtgcgggaagtcctgcacgggaaccagcgcaagcgccgcaagttcctggagacggtggagttgcagatcagcttgaagaactatgatccccagaaggacaagcgcttctcgggcaccgtcaggcttaagtccactccccgccctaagttctctgtgtgtgtcctgggggaccagcagcactgtgacgaggctaaggccgtggatatcccccacatggacatcgaggcgctgaaaaaactcaacaagaataaaaaactggtcaagaagctggccaagaagtatgatgcgtttttggcctcagagtctctgatcaagcagattccacgaatcctcggcccaggtttaaataaggcaggaaagttcccttccctgctcacacacaacgaa

SEQ ID NO: 37968 - DNA, 493 bp, Homo sapiens
  misc_feature (1)...(493): n = A,T,C or G
gtgggcccnnttcgagaccctagtccgtgttgtggaatccgcctggtcgactgccacccccaactctggccccaccacagccgccccttcctgaaaccatagagcggccggtgggcactggggccatggtggctcgctccagcgacctgccctatctgattgtcggggtcgtcctgggctccatcgttctcatcatcgtcaccttcatccccttctgcttgtggagggcctggtctaagcaaaaacatacaacagacctgggttttcctcgaagtgcccttccaccctcctgcccgtatactatggtgccattgggaggactcccaggccaccaggccagtggacagccctacctcagtggcatcagtggacgggcctgtgctaatgggatccacatgaataggggctgcccctcggctgcagtgggctacccgggcatgaagccccagcagcactgcccaggcgagcttcagcagcagagtgacaccagcag

SEQ ID NO: 37969 - DNA, 489 bp, Homo sapiens
  misc_feature (1)...(489): n = A,T,C or G
ggggcccctttgagaccatgtagaggtgcgtgaattcatcaccacggcggcagccctttaaacccctcacccagccagcgccccatcctgtctgtccgaacccagacacaagtcttcactccttcctgcgagccctgaggaagccttctttccccagacatggccaacaagggtccttcctatggcatgagccgcgaagtgcagtccaaaatcgagaagaagtatgacgaggagctggaggagcggctggtggagtggatcatagtgcagtgtggccctgatgtgggccgcccagaccgtgggcgcttgggcttccaggtctggctgaagaatggcgtgattctgagcaagctggtgaacagcctgtaccctgatggctccaagccggtgaaggtgcccgagaacccaccctccatggtcttcaagcagatggagcaggtggctcagttcctgaaggcggctgaggactatggggtcatcaagactgan

SEQ ID NO: 37970 - DNA, 487 bp, Homo sapiens
  misc_feature (1)...(487): n = A,T,C or G
cttcgccccctnttaggatgaccntagcgcagngncgnggaanncatcaccacggcggcagccctttaaacccctcacccagccagcgccccatcctgtctgtccgaacccagacacaagtcttcactccttcctgcgagccctgaggaagccttctttccccagacatggccaacaagggtccttcctatggcatgagccgcgaagtgcagtccaaaatcgagaagaagtatgacgaggagctggaggagcggctggtggagtggatcatagtgcagtgtggccctgatgtgggccgcccagaccgtgggcgcttgggcttccaggtctggctgaagaatggcgtgattctgagcaagctggtgaacagcctgtaccctgatggctccaagccggtgaaggtgcccgagaacccaccctccatggtcttcaagcagatggagcaggtggctcagttcctgaaggcggctgaggactatggggtcat

SEQ ID NO: 37971 - DNA, 494 bp, Homo sapiens
  misc_feature (1)...(494): n = A,T,C or G
cgcgcccatcgagnccatagagagccntgnggannnccaaacaaagatggattgtacccccgaaaaaggacatacttttgtttattggtatcaacagaatcagaataaagagtttatgcttttgatttcctttcagaatgaacaagttcttcaagaaacggagatgcacaagaagcgattctcatctcaatgccccaagaacgcaccctgcagcctggcaatcctgtcctcagaaccgggagacacggcactgtatctctgcgccagcagtcaatcggcggactagcgggagaaccctagccaaaaacattcagtacttcggcgccgggacccggctctcagtgctggaggacctgaaaaacgtgttcccacccgaggtcgctgtgtttgagccatcagaagcagagatctcccacacccaaaaggccacactggtgtgcctggccacaggcttctaccccgaccacgtggagctgagctggtgggtgaatggg

SEQ ID NO: 37972 - DNA, 492 bp, Homo sapiens
  misc_feature (1)...(492): n = A,T,C or G
caactgagacccctcgcagnggcnggaactgagngacccttacccagcccaataggtgatggggaatcggagactgctgcgcatcatctggcgatgccaggaaccagcagggaggggaaagggggagagaacgggcccaaggagaggcggcgcttccctcctcaactccaggcctgggaggtgactcatagagtctgccccctctcgcccttctgccctgggaggtcgggggtgaggatggtggaggggaagcgtgcgaaaggggtgccagggttagaatgaggtgcccaccgaggagagagacgtctgaagtctggcgtcttttccttcaaggctgctgtgtacattgtgaggcgggagggctgaagatcaagttccctcgagggaggttaaagaatggctaattggacccggatactctgctcttcggggagcgctccgctctgggaggacgggactcccctctggcatggcggttcattgctctggccc

SEQ ID NO: 37973 - DNA, 494 bp, Homo sapiens
  misc_feature (1)...(494): n = A,T,C or G
acgggcccncattagagaccctagtagagagccgntgaanacctaccactacctgcccttcagcctgccccaccggaggcctcacttcttctttcccaagtcccgcatcgtccgcagcttgatgcccttctctccgtacgagcccctgaacttccacgccatgttccagcccttccttgagatgatacacgaggctcagcaggccatggacatccacttccacagcccggccttccagcacccgccaacagaattcatacgagaaggcgacgatgaccggactgtgtgccgggagatccgccacaactccacgggctgcctgcggatgaaggaccagtgtgacaagtgccgggagatcttgtctgtggactgttccaccaacaacccctcccaggctaagctgcggcgggagctcgacgaatccctccaggtcgctgagaggttgaccaggaaatacaacgagctgctaaagtcctaccagtggaagatgctcn

SEQ ID NO: 37974 - DNA, 489 bp, Homo sapiens
  misc_feature (1)...(489): n = A,T,C or G
agaggcccnnatagaaacctttcgagaccctaggcagnggcggaattatcaccacggcggcagccctttaaacccctcacccagccagcgccccatcctgtctgtccgaacccagacacaagtcttcactccttcctgcgagccctgaggaagccttctttccccagacatggccaacaagggtccttcctatggcatgagccgcgaagtgcagtccaaaatcgagaagaagtatgacgaggagctggaggagcggctggtggagtggatcatagtgcagtgtggccctgatgtgggccgcccagaccgtgggcgcttgggcttccaggtctggctgaagaatggcgtgattctgagcaagctggtgaacagcctgtaccctgatggctccaagccggtgaaggtgcccgagaacccaccctccatggtcttcaagcagatggagcaggtggctcagttcctgaaggcggctgaggactatggggtcat

SEQ ID NO: 37975 - DNA, 483 bp, Homo sapiens
  misc_feature (1)...(483): n = A,T,C or G
aggccccaaatatacccatagaggccntggaccatcacccggcggcagccctttaaacccctcacccagccagcgccccatcctgtctgtccgaacccagacacaagtcttcactccttcctgcgagccctgaggaagccttctttccccagacatggccaacaagggtccttcctatggcatgagccgcgaagtgcagtccaaaatcgagaagaagtatgacaaggagctggaggagcggctggtggagtggatcatagtgcagtgtggccctgatgtgggccgcccagaccgtgggcgcttgggcttccaggtctggctgaagaatggcgtgattctgagcaagctggtgaacagactgtaccctgatggctccaagccggtgaaggagcccgagaacccaccctccatggtcttcaagcagatggagcaggtggctcacttcctgaaggcggctgaggactatggggtcatcaagactgg

SEQ ID NO: 37976 - DNA, 492 bp, Homo sapiens
  misc_feature (1)...(492): n = A,T,C or G
aggggcnccnnatagataccctagtcgagagccgntgaancctgtggnggaggcgatggtggtctcctctctggcaatgagaaaattaccatgcagaacctcaatgaccgcctggcctcctacctggacaaggtacgtgccctggaggaggccaatgctgacctggaggtgaagatccatgactggtaccagaagcagaccccagccagcccagaatgcgactacagccaatacttgacgaccattgatgagctccgggacaagatcatggccaccaccatcgacaactcccgggtcatcctggagatcgacaatgccaggctggctgcggacgacttcaggctcaagtatgagaatgagctggccctgcgccagggcgttgaggctgacatcaacggcttgcgccgagtcctggatgagctgaccctggccaggactgacctggagatgcagatcgagggcctgaatgaggagctagcctacctgaagata

SEQ ID NO: 37977 - DNA, 487 bp, Homo sapiens
  misc_feature (1)...(487): n = A,T,C or G
gagcccncttcgagatcatgtcgagagccgggaattcgcagaggggtccatacggcgttgttctggattcccgtcgtaacttaaagggaaactttcacaatgtccggagcccttgatgtcctgcaaatgaaggaggaggatgtccttaagttccttgcagcaggaacccacttaggtggcaccaatcttgacttccagatggaacagtacatctataaaaggaaaagtgatggcatctatatcataaatctcaagaggacctgggagaagcttctgctggcagctcgtgcaattgttgccattgaaaaccctgctgatgtcagtgttatatcctccaggaatactggccagagggctgtgctgaagtttgctgctgccactggagccactccaattgctggccgcttcactcctggaaccttcactaaccagatccaggcagccttccgggagccacggcttcttgtggttactgaccccagggctg

SEQ ID NO: 37978 - DNA, 491 bp, Homo sapiens
  misc_feature (1)...(491): n = A,T,C or G
agagggaatcgagatcctagaccagcgtcgnggaattctttggctttcacccccaaccagtgaccaaagacttgaccactcaaagtccagctccccataacactgctcgacatggacaccggtgtgattgaaggtggattaaatgtcactctcaccatccggctacttatgcatggaaaggaagttggcagtatcatcggaaagaaaggagaatcagttaagaagatgcgcgaggagagtggtgcacgtatcaacatctcagaagggaattgtcctgagagaattatcactttggctggacccactaatgccatcttcaaagcctttgctatgatcattgacaaactggaagaggacataagcagctctatgaccaatagcacagctgccagtagacccccggtcaccctgaggctggtggtccctgctagtcagtgtggctctctcattggaaaaggtggatgcaagatcaaggaaatacgagagagtcc

SEQ ID NO: 37979 - DNA, 490 bp, Homo sapiens
  misc_feature (1)...(490): n = A,T,C or G
atgtggaatcgagatcatagagcagcgttgnggaattccggntgtcttcctcaccctgtccgtgacgtggattggcgctgcgcccctcatcctgtctcggattgtgggaggctgggagtgcgagaagcattcccaaccctggcaggtgcttgtggcctctcgtggcagggcagtctgcggcggtgttctggtgcacccccagtgggtcctcacagctgcccactgcatcaggaacaaaagcgtgatcttgctgggtcggcacagcctgtttcatcctgaagacacaggccaggtatttcaggtcagccacagcttcccacacccgctctacgatatgagcctcctgaagaatcgattcctcaggccaggtgatgactccagccacgacctcatgctgctccgcctgtcagagcctgccgagctcacggatgctgtgaaggtcatggacctgcccacccaggagccagcactggggaccacctgctacgcc

SEQ ID NO: 37980 - DNA, 499 bp, Homo sapiens
  misc_feature (1)...(499): n = A,T,C or G
aaattgattaccntgcgcanggcnggaaactgagtccntacgcagagncgaggaantcccgccatccatctcacagcaccactccttctggccctggagatgaggtggctcggggcattgctggagaaaagtttgacatcgtcaagaaaaggggcatcaacacctataaagtaggatttaagcacctctcccttccccaaaactccttatgggtacctttttcccttttcttcgagagcgtaatatcccatctgtggctgagagtaagagcctggggggtgctggggtaaatacctgttgtgtggggaggctggtagggtctctgatttattcccccatttcccaatcagtgcacaaagcagctgttatcagaacgatttggtcgatgctcacggactgcggacctggagctagagctgcacattgacttgctgcgtgagacaaancgcaagtatgagagtgtgctgcaactgggccgggcactgacagcccacctcta

SEQ ID NO: 37981 - DNA, 494 bp, Homo sapiens
  misc_feature (1)...(494): n = A,T,C or G
agccccattgataccctngncangttttgagtcctctatccatgtggtggaattccccgaacgtggtcggttggagcaaatatgtccctccggaggcacattgggaaccctgagaagatcaacccttaaaacatagctccagtgtccattcttccatgaagtctttcttatcacccccagtggatgaacaatctcctttgacattcctccctagagccctccatgtccgtgctgcccacgtggcaccagcatgcacactacatgttgctcaggtcttcatttggcagtatctgatgaaaaggataccacagaacccaagataccagcatatcaaatcaagactggacactggtaacagtatgactaaatatactgagaagctcgaagagattaagaaaaattatagatacaaaaaagatgagcttttcaagagactaaaagttacaacttttgcccagctgatcatccaagttgcttccctctctgatcaaaca

SEQ ID NO: 37982 - DNA, 503 bp, Homo sapiens
  misc_feature (1)...(503): n = A,T,C or G
ccattgatnacccnttggcagngngccggaatnccgtttgatcaccctcttcctcactctcccaatagcagttacccaaactctcctgggagcagcagcagcacctaccctcactctcccaccagctcagacccaggaagccctttccagatgccagctgatacgcccccacctgcttacctgcctcctgaagaccccatgacccaggatggctctcagccgatggacacaaacatgatggcgcctcccctgccctcagaaatcaacagaggagatgttcaggcggttgcttatgaggaaccaaaacactggtgctctattgtctactatgagctcaacaatcgtgtgggtgaagcgttccatgcctcctccacaagtgtgttggtggatggtttcactgatccttccaacaataagaaccgtttctgccttgggctgctctccaatgttaaccggaattccactattgaaaacaccaggcggcatattggaaaaggagttcn

SEQ ID NO: 37983 - DNA, 466 bp, Homo sapiens
  misc_feature (1)...(466): n = A,T,C or G
aatgagaccactttgaagngcggtggaattcctatggacaaacaacacctcaacaatgaaacctgttcatgtctaaaagcagctgggctgggaatcttcccctttgttcaaggccttccagtaaagcccagctgtccccttgctgtgcatggggctctggggagttccactctttgatggagggcagaggccctgagtgcaaactccctgggaagagtcccatgctaacatgtgctcaaaggagccctcctctcacatctcagcgaccaagaaccccaatccctaatcagagctctgcctctgccccacatggggccctaccccacttccagggagcacagcagcctctgaccctagccctgccctggcagcatgggacctgccaacagctgagggtggcagcagtctgtgctgggatctgtgcccggatctgtgcccattctcttcagtaaggctggagctgcga

SEQ ID NO: 37984 - DNA, 498 bp, Homo sapiens
  misc_feature (1)...(498): n = A,T,C or G
aggaggccnnattagaacnccntnattgatattcctagcgcagngncgnggaattccctcagctccagacgtaggggaggggttgccacaggcctccctgtttgaagcctgcccttgtctgagatgctggtaatggccatggtacccccttctgggcatctgttctggtttttaaccattgtcttgttctgtgatgaggggaggggggcacatgctgagtctttcaaggctgcgtctggaggggcccctgcttctccagcctggacccccagctttgcccaacaccagcccctgccccagcccaagtccaaatgtttacagggagcctcctgcccagtcccccaaccccagccgctcggaggccccaaaggaaaaagcacaagaagcgtgagacgccaccattcctggaaaccacagtccacctgctcattctcgtagctttttaaaaaaatgaaagtaaaggaaaaaaaaaaaaaactgcaaatctagaaaactttt

SEQ ID NO: 37985 - DNA, 476 bp, Homo sapiens
  misc_feature (1)...(476): n = A,T,C or G
catcgacnccccatcngcagaccttaggccangccgnggaattcctgnggttaacaaaattaaatttgggaaaatcaagagtaagacttttaatgtttctaccacctgtcagcctggaaagttttcttagtttttctttttggagaggcatttgagatttgtgttcctgtcaacttgagagaggaatggaggaagtcaaagggaagaacacgagctgatgttgcactccgaggggaaacaggagtgagggcagggagcccataagagggtcagggtgaagatgggtgtggggaaggcagagcaaaccagctgctgctgtcaaccctgacctatttcctggagctctgggagccctcccatccctgctctcagcaacagtgatgctgcctttgggcggctgtgcagccaacccacactgatagctgtccctgtcattntcttanatgtcaccagtgaaagagacattttcacctccg

SEQ ID NO: 37986 - DNA, 471 bp, Homo sapiens
  misc_feature (1)...(471): n = A,T,C or G
catagagaccaaattgaagngcgtcggaanncngctcctggnggctgggaggcatcagttgctatatattacaaacacaaaagaaaaaataggaaaatgtttttaaaaaggtcatatattttttgctacttttgctgctttatttttttaaattatgttctaaacctattttcagtttaggtccctcaataaaaattgctgctgcttcatttatctatgggctgtatgaaaagggtgggaatgtccactggaaagaagggacacccacgggccctggggctaggtctgtcccgagggcaccgcatgctcccggcgcaggttccttgtaacctcttcttcctatgtcctgcacccagacctcacgacgcacctcctgcctctccgcttgttttggaaagtcagaaaaagaagatgtctgcttcgagggcaggaaccccatccatgcattataggcgctaggcagagagtcat

SEQ ID NO: 37987 - DNA, 476 bp, Homo sapiens
  misc_feature (1)...(476): n = A,T,C or G
catggagnccnatcgagnatcttaggccagagcggaggaattcgccctcagcccacgcggcagcagaagcgcgcctgcagcctcctctaggggtaagagtcccccactctagtgcccaactcccatacacagcaggccctggctgagcagtggcctttggttcactgtgagtggcatttaggccaggacagaaagaaggtgggtatggaggttgcctcagtttccgcagcctacttgtcatctgcctgggccagtctcactctctggagctcatcttccagaggcaaggcccaaggtatgaatgaatgcctggtaaccccccacccccgggccagggagtgggtgtcacggagccccactcttgccattcctgcaggaggtgatggaaaagatgccttggtccctggccctaggagagcccagtcgagccagggagatcctgcacccacatatgtgggtggaggtgggagagcctg

SEQ ID NO: 37988 - DNA, 495 bp, Homo sapiens
  misc_feature (1)...(495): n = A,T,C or G
ccccccccccgcccgcccncaatagagncccaactgagatcataggacagngcggcggaattcttggcctgccctttcccccagagaagagggccaagagagggaatattcatccccccatagaccccaaccccccacagctgcaggtcttgccttctggtgctggccctcgagcccaaaccctcaatcccaatgccctcatccatcctgtttccactgttactgatcatcgcagccagatatcaagccctgcctctttcgatttggggtcttcatccttcatccagtggggtctggcatggctggactctgtctttgacctggtcatggtggctgagtacttcgatgagtcattggttctgctggcagatgccctgtgctggggtctagatgacgtggtgggcttcatgcacaatgcccaggctggacataagcagggcctcagcactgtcagcaacagtggactgactgcggaggaccggcagctgactgcac

SEQ ID NO: 37989 - DNA, 491 bp, Homo sapiens
  misc_feature (1)...(491): n = A,T,C or G
ccaactgattccctatgcaanggcnggaatagatgacccttctccgctctgccagccctcactgctgcccgtcattgttctcgcagttagatgggggtgctttgtgacggctgccaagttggggtgtgttctctttattccgtttttcaaacagaacaaggcctccaaggctgaccccagacaacccaccccctcggaccctaattcaccttattgcactgattttttttatcaagtcgtattttattgtacaggagccacgccctgatttcttaaaggcgccttgcactctggccatgtgttatctctgcagccggtgtgtgggaggcctcttgtgagccagttgttttcccgcctccaccacccccctcgaagatttagggatgccaggggggaagaaggtggcttggggtggcagcagcggtgccactccaacgtccgctgcgagcaccgccccctctggggtcaggcgtttggagaccagcgaaagg

SEQ ID NO: 37990 - DNA, 486 bp, Homo sapiens
agcgggaatcgagatcatagagagcggcgggaattcctaccctggccacaaggggcctgcctggggaggggggttggggactccccagtaactctgccataggccagtacccaccatagctgctaatacctaccaacaccctgctgcagtaagtgacctgctgaacacagaagcactggaagaagcgtgtgcacaggcccctgaactcaggagggaaacaggcatcagagacacatagcagcatcgacctggccatacccagagaccaggctgtgctcagcgtccccggaccgtcctcctgggctctcaacacctggaccctcccagctgagatttcattcataaatctgacccccagagggctgtgcctggcaagaaaggtcagcgaggctgtccccagtcatccgggccgaagacagaatttaagggagctgcaaagagtaccctggggtggcagccatgtgcctgggaggcccctggtgccag

SEQ ID NO: 37991 - DNA, 488 bp, Homo sapiens
  misc_feature (1)...(488): n = A,T,C or G
agcgggaatggagactttgacagcgtcgnggaattcgatagatgttgatatatatgtttgtgtatatatatcaaaccaaattggataggagaagtatagctttacagatgaggagaaggagctctttagaggtcggagtcaagactggtgtcttggacgtgcatgggctgtgtcccaggccactccgcacacatggggctgaggcgtggcgccgggcccttgtcatccacctcaccacggcagagccagcaggccctgtagggtgctgctgctgtctcactgggtcccagcttcaagcgcatcagtgggtgacgggggcaacaaatcagagtgactggaagcttccatcccgttttgctttgaccacgtgtactgagctgcagcctctgatactctgtcacgtttccaaaaatggtatccattaggatagaaagagaatggatctgcagaaatgtttacctttcaactgctcatgaattcaggacact

SEQ ID NO: 37992 - DNA, 498 bp, Homo sapiens
  misc_feature (1)...(498): n = A,T,C or G
ggggctccnattagataccctaggaannnttcgtagaccactagtccagagagggggaattcccccggctgctgtggccacagccctgcctgggcctgtctctcaagggcacccagcttgctcggcctcctacatgtgtcccgttggggaggcaagaggctgaggggcttccgagcccctgagagcggacatctcctcccgcaggcctttactccgcactccccactggcagccgctggtgtctcttcacacagaggcacaacctggacccaggcagcctctttcctccctccccaatctcttccatttttctacagattttttttttttgggccatactaaaaacgggggtctggttgaactccgggcctccagggatcctccttcctgggcctcccaaagggcgggaatcacaggggggagccacccgccccagcctttttttttcctaaaggcacttggttttttccgtttttccaaaaaattcagcggacggat

SEQ ID NO: 37993 - DNA, 498 bp, Homo sapiens
  misc_feature (1)...(498): n = A,T,C or G
agggcgnnnnnnccgggcaaatgagaccctaggcactgagngccatagagcacgccgcgngatggaagctgacgctgaggacgaatcaccgagaccctaggaaagaatacacagggcagtgaagagctaacctcgagctctggctggagcaagagacaaaggccccgccaggtaccgggagccaccccttcctctctgactgtgaacctgattggacagttcccaccccagcgcccttaatggatagagctccaggctccgcgccctcaggccttgagtgacagaagacgcgatcagaccttgcactgaataccgcgagcgtgacaggctcttggctccagtcatttcaggaagggctatctctgggttgggcccacatgtgcccaggggttattttaaatcttgtgtataaggctatgtccatttataaattttattcatacacacatatatgttgctcacaaatggaaacactataataacgaatatttgtacatn

SEQ ID NO: 37994 - DNA, 502 bp, Homo sapiens
  misc_feature (1)...(502): n = A,T,C or G
cccccccccccnnagngnaatgagaccctgngcactggagaccatagtccagagcggnggaattcggacacagatacgaggcgggatggccgcattctacacctggagatggactttgagaatagccgaagtcatcgggagcaggaagaaaagctgctcatcagtgcctggtataatatgggcatggccttgcagcatcgagctggggaggagcgggcgcctgcccatgcccagtcattcctggcacagcagcggctggcaaccaattctcgccgtggacccttgggacgcctggcatctctgaaccttcgccccactgacaagcactgacagacctcacaatcaagccagcctgggctccacccaccctggcttcctccagctcacatggcgcccagcactgggcttcagccaggtgctcgagagctttgaggccatgatctctgctcttccctctcccaaattggtggggagggagggcgggaggtagatataggcctgn

SEQ ID NO: 37995 - DNA, 480 bp, Homo sapiens
  misc_feature (1)...(480): n = A,T,C or G
gggccatgtaccctggcaatgatggcataggaagagcgggngctggagaacaggagaacgggaaggaaagtgaagttatccgaagtttgttaagcacctttttactgacctttttggggtttttttggtgtagagggtgtgtagaaatagaaaagtaaactccagttctgttggatttagcgcgactggtgcccaggctgcccaactcacacaagctcttttctgggaaaaggagagcttgtcctttgtttgtttgtttgttttaactgatggtttcgttttgtttttttttaagatggagtctcactctgtcgccaggctggagtgcagtggcgcaatctcggctcactgtaacctccgactccctggttcaagcgattctcctgcctcagcctcctgagtagctgggattacaggcatgtggcaccgtgcccagctaatttttgtatttttaagtagagaccggggtttcaccaggtt

SEQ ID NO: 37996 - DNA, 506 bp, Homo sapiens
  misc_feature (1)...(506): n = A,T,C or G
ggtcncncagagggccccngggcgggccnnaatagagaccanatagatgagcgctggaaancgcngccgcanccctggaggctgggaatgtggaggctctgtgagccctgcagccctcataatcagggccagggatgcagaagattgagaggatatggagatggatagagggcaggagacccttaggatagattgtgggacccaggcaggaacaggtgtccacaagaactcaggatggcatcagttagctcagaagccacctggaagacccagtgtttccatctctggaatctctgttttatgctaaatggatttaggaagactgtttttcttttaagggggaaacaaggttgagaaaaggacgaagaagtgtaagtcccgctgattctcggnggtaaggctcggatggcaaggacgcgttctgcctgggcatgtaggggaggtgtttttgccatcaccagtttctcaagctggggagcacagaggggaggaggaggactaaatga

SEQ ID NO: 37997 - DNA, 490 bp, Homo sapiens
  misc_feature (1)...(490): n = A,T,C or G
cgggaaggagacctagagcaccctatggagtgccgnggaattcgcacagaggctggcagggcaggaagccaggccagagaagggggagcctggctgccttacccggctggcccagcatgttggcaaagcggacatcagtgctgactgctggatatagctccatccaggtggacatagagtgcagctgccctgtctcatgcagctcgtccaggaaggtctgagcagggagaggccagttatagggagagtgagacagggaggcagagccacagactgagggggaagagagggaatggcagaggaagaggcagggacaatcaagattgaggaaatgcaggcaagagaggcagagatgaagagatgcagatggaaggctgagaacaatgcaaaaagagagaaagtaaatacacagagagggacagaacaaaaaggtgagaacaagccagtcccgggatgcaaagaaacagaaacctgcctgcagtaaccccta

SEQ ID NO: 37998 - DNA, 482 bp, Homo sapiens
  misc_feature (1)...(482): n = A,T,C or G
aggaaaagagacatgacagcggtggaatncctcctcccgcattaatgggggcattcgtgcagacaaagacagcccccagagtcaggcctggattttaatcccaccatctcgcccactgagtgactgcaggagaccagaaggcggggaaaacacggtttagcactcactgctagctggcagttcacactgccttctcaaatgatccccataattgctattttacagatggggaaactgaggcatggggttcatttgattcacgcatggtcactcacctaataagtggcaagctaggactggaatccatccctcctgaatccaaagccaacactctggcccctttcccccttggccccctctcccctgcattcccagtgcctgtgtgggggtcacccacaacgctccccaaatgtccactgtgcaccgagccctgaggcggtgtctccacctgacctgatcttctggcacagaaagccactggc

SEQ ID NO: 37999 - DNA, 488 bp, Homo sapiens
  misc_feature (1)...(488): n = A,T,C or G
atggaatcggaccatgatagcctcggccangncgnggaattccctgttcacacaacccctgtggactgcagcctcgctctttccaccctgttatggcttctgtgaggcccattttcccttttccccagctgatgaggagccggccccctcagttcccacttgcttgggttcctgggggttttctgatcactggtgcgcattgatgtacatattttcctccagtctggggaggagagagactggaaacgttcctggactgctgaagaggagacccagttggcttcactttttgagaagattcgccctgtaccccaaacccctttccagtattacccttaatgcttgagaacctaaagctggttatcctggcgaacacccctacccttctattgcgggtccccacatgcacacagaactctgacacaggatcagctgcacttaagaaatcatcccagctaagttcattattcctcatggggtggggagag

SEQ ID NO: 38000 - DNA, 511 bp, Homo sapiens
  misc_feature (1)...(511): n = A,T,C or G
caataggaaannccttgtggagnggngcggnnnnnaactganaaccttcgcagngngcnggaattctctatctcttctgctggctgggctcaatgccgcggagtgatgatgcgggtgtgctggttggtgagacaggacagccggcaccagcgaatcagacttccacatttggaagcagttgtgattgggcgtggcccacagaccaagatcactgataagaaatgttctcgacagcaagttgaaagcagagtgtaacaagggatatgtcaaggtaaagcagagtttgaggaagaggcaaagaaccctggcctggaaacacacaggaagagaaagagatcaggcaacagtgattctatagaaagggatgctgctcaggaagctgaggctgggacagggctggaacctgggagcaactctggccaatgctctgtgcccctaaagaagggaaaagatgcacctatcaaaaaggaatccctgggccactggagtcaaggcttgaagatttctatgc

SEQ ID NO: 38001 - DNA, 488 bp, Homo sapiens
  misc_feature (1)...(488): n = A,T,C or G
cgggcatgagacatgagaccataggccangncgnggaattcgcccgcggggaggcccgacttcgaccacctgctacggacctacggagacgtggttgtaccagttgcaaactgtggggtccaggaatacaactcgaaccccaaagagcacatgactctcagagactacatcacctactggaaagagtacatacaggcgggctactcctctcccaggggctgtctctacctcaaagactggcacttgtgcagggactttccggtggaggacgttttcaccctgcctgtgtacttctcgtccgactggctgaatgagttctgggatgcactggatgtggatgactaccgctttgtctacgcggggcctgcgggcagctggtccccgttccatgctgacatcttccgctccttcagctggtctgtcaatgtctgtgggaggaagaagtggctcctcttccccccagggcaggaagaggccctgcgggaccg

SEQ ID NO: 38002 - DNA, 488 bp, Homo sapiens
  misc_feature (1)...(488): n = A,T,C or G
ggcgaatcgagacatagacagcgtcgnggaatncggnccccccagatggagtgaaatgctcccctggaggaccagtggagacactgagccccgagacagtgagtggtggcctcactgctctgcccggcaccctgtcacctccactttgccttgttggaagtgacccagccccctccccttccattctcccacctgttccccaggactcaccccagcccctgcctgcccctgaggaagaagaggcactcaccactgaggactttgagttgctggatcagggggagctggagcagctgaatgcagagctgggcttggagccagagacaccgccaaaaccccctgatgctccacccctggggcccgacatccattctctggtacagtcagaccaagaagctcaggccgtggcagagccatgagccagccgttgaggaaggagctgcaggcacagtanggcttcttggctaggagtgttgctggttcctcct

SEQ ID NO: 38003 - DNA, 493 bp, Homo sapiens
  misc_feature (1)...(493): n = A,T,C or G
gggggattgannccatcgatanctctagtccagngtcgnggaattcggcagtgagaggggcgggagcccgcgggggccgcgcccttctctcgcttcggactgcgcaacgctgcgctctgggctgacaggcggataaaacggtcccatcaagactgagaaaaagcacaccagctattggcacagcgtgggcagtggggcctacaggatgactgacttagtctacagagatcccggcgtacttaagcagatgaagactcttaagatgacagaaggtgatttttctggtgatcgaggacttccggggtaatgacagtgatgaaatgcaggggacctggtaggtttcttttggagactaactgggggctgcctggtgggacagaacagcatgtttccaagggctgtggctggtcatagccatgggatctccaactgcatgcaagagcaacctggaaagactttgacagcgcaggttgcccccaagtttcctggcagn

SEQ ID NO: 38004 - DNA, 481 bp, Homo sapiens
  misc_feature (1)...(481): n = A,T,C or G
cggnctgccaaatggagaccctagatagagcgccgtaanncgggcngacatgaattcctcctgttccttctgtctttctttaaacaagtcaccaggggccatatccatgtcccatggtgggtaaatggtgttgtgtccctacaggcctcccgctcaaggctctctctggccaggaatgtggatttcttaatgcacagtttgaccagctccttcactgccaggcatagatctttaggtactgtaagtgttcagtaagcacccgtgaaaggtcagagatgggggcagacggtggaagtgattcacagaaacaagaaggagaatttgattgtggtatgaaaaggcttccacaagcagccaaagataaaatatgcctattgatctacaggatgtcaaattaagaaaaacggccaggtgtggtggctcacgcctgtagtcccagcactatgggaggctgagatgggcggatcacaaggtcaggaga

SEQ ID NO: 38005 - DNA, 477 bp, Homo sapiens
  misc_feature (1)...(477): n = A,T,C or G
catcgacccccctnatttgagaccctagtccagngcggnggaattccggcgttggcggcttgtgcagcaatggccaagatcaaggctcgagatcttcgcgggaagaagaaggaggagctgctgaaacagctggacgacctgaaggtggagctgtcccagctgcgcgtcgccaaagtgacaggcggtgcggcctccaagctctctaagatccgagtcgtccggaaatccattgcccgtgttctcacagttattaaccagactcagaaagaaaacctcaggaaattctacaagggcaagaagtacaagcccctggacctgcggcctaagaagacacgtgccatgcgccgccggctcaacaagcacgaggagaacctgaagaccaagaagcagcagcggaaggagcggctgtacccgctgcggaagtacgcggtcaaggcctgaggggcgcattgtcaataaagcacagctggctgagan

SEQ ID NO: 38006 - DNA, 481 bp, Homo sapiens
  misc_feature (1)...(481): n = A,T,C or G
tttgagaccctggcagnggtagagaacctatagttngccgagccctgagtaagtaatgacatatttttgctgaattaaaagaaaaacctcattttaatttttgtatttgattttagatattcacactgcagaggcgctgccagaaaaaggaccaagtcacagcatcattcctcttgcgggtgtactgacactgatagtcattgtggccatttgcacactttccttctgcatatacaagcataacggaggcttcttcatgagacttgcagggtttcggaatccttactatcctgcaaccaactttagtacagtatatttagaagaaaatattctcatttctgatcttgagaagagtgaccaataataatgaggtcagagaatgccacagacaccaggaaaaaagtgtactgagcatggtggcacgcacctgtggtcccagctacttatgaggctgagggaagaggatcaactgggcccagaa

SEQ ID NO: 38007 - DNA, 510 bp, Homo sapiens
  misc_feature (1)...(510): n = A,T,C or G
gannnnnaagagnnccccnaggcgcnccncaattgaaaacccactgagagcataggccagngcggnggaattccacaggcaatgctccagaaggattgccccagctgatggaagtagtgcgatccaactatgaagcaatgattgatcgtgctcatggaggcccaaactttatgatgcattctgggatctctcaagcctcagagtatgatgaccctccaggcctgagggagaaggcagagtatcttctgagggaatgggtgaatctctaccattcagcagcagctggccgcgacagtaccaaagctttctctgcatttgttggacaggtagagcttttggaaagaaaggtgctttttattcaacataagtagggtgtgatgcctccaatattaaagctcagtattgcgtacatgtggtcagacagttacctccatactcatgcaaacccaaactgtcatcattatatggttaaattacagcctgttttctcatggttgatcactaagcagt

SEQ ID NO: 38008 - DNA, 492 bp, Homo sapiens
  misc_feature (1)...(492): n = A,T,C or G
gagatcccnggngccccncaactgagaccnattgaagaccctcggaanncgcngagcccanganactgcagctcctactctcagaagccatttacctgcactgcacccactggtggccacagagaagaataacaggaagcagagtctggtcattgtcctctaaggaaaaacaagatgcacaaggtcactggctggcccttcctttgtcatcctctcgttcttacttcctaacctttctgagtcaggaatcctcaaatggaaagtgatgggctcatgagcattctaaaacctcctggaatatgccccacggctgtccaacactacaaatacccaaggggccatgggctcatttccctgaaactctaaatctctaaaactgagacctgagctggcatcattgctcccacacacatggatcaaaaacatttttctcaccagcatggacagcatccttacagatgccaggagctgatagttcccttcctgtggaca

SEQ ID NO: 38009 - DNA, 511 bp, Homo sapiens
  misc_feature (1)...(511): n = A,T,C or G
cttaatggaaagccttngcangngccggnnnaaatgagatccttcgccangngccggaattctactgggctccatcctgagctccatggagaagccacccagcctcggtgaccaggagactcggtgcaaggcccgagaacaggccgcccgcctgaagaaactactagagcaagagaaacaacagaaagtggagtttcgtaaaaggatggagaaggaggtgtcagatttcattcaagacagtgggcagatcaagaaaaagtttcagccaatgaacaagatcgagaggagcatactgagtttgcaccctcagatgaagagcttgactcttaccgtcgtggagaggaatgggacccccagaaggctgaggagaagcggaagctgaaggagctggcccagaggcaagaggaggaggcagcccagcaagggcctgtggtggtgagccctgccagcgactacaaggacaagtacagccacctcatcggcaagggagcagccaaagacgcagcccaca

SEQ ID NO: 38010 - DNA, 505 bp, Homo sapiens
  misc_feature (1)...(505): n = A,T,C or G
aataggaatnccttcggcangnggcgnnnnnaactgagatccttggccaanggcnggaattcggngattgcaaggtccgaggggtcctcccggccccagagggcggcccggccccccgggtcctccagggggtcctatccaattgcaacaagatgatgttggggcagctttccagacgtggatggacaccagtggagcactcaggccagagagttacagctatccagaccggctggtgctggaccagggaggagagatctttaaaaccttacactacctcagcaacctcatccagagcattaagacgcccctgggcaccaaagagaaccccgcccgggtctgcagggacctcatggactgtgagcagaagatggtggatggtacctactgggtggatccaaaccttggctgctcctctgacaccatcgaggtctcctgcaacttcactcatggtggacagacgtgtctcaagcccatcacggcctccaaggtcgagtttgccatt

SEQ ID NO: 38011 - DNA, 483 bp, Homo sapiens
  misc_feature (1)...(483): n = A,T,C or G
aggattcccccccccccccatgagaccctagatagagagcgtaagncnngncgcctacagaaatagaaatggattgggcagagaaaaaatgtgaaagcagccaaaaatgagaggaaatttgttccttgaagtataaattgtccaaacgagccacctcccagcacaccgcctgtccccgtcttgtctgtccactcccattttgagccagcccatccttgatggggatgcccatgaggaacctgggcttgggagggtggcatcagctggccgcctgcctcctgtcctgcaggcccggcccctggaatgtaccatgtgtgggatgggtgtgtgggagggtgaaggggtgttanttttctttgttctttccaaccaaactcaaacacacagacactcttagccaacccttaaaaagggatgctccactgtcatgggccttgccggatggatatgtatccaagtgagttctgggaatggacgtgttat

SEQ ID NO: 38012 - DNA, 494 bp, Homo sapiens
  misc_feature (1)...(494): n = A,T,C or G
tggagctcnnattcgagaccataggcagngttgtggaattccttttataaaagggcacaggggaacaaccgaaacccagaagaaatgcaaggaagcacacatatatcaggatcattttacaagctccataattgaagctttgtatcatcgtcgggtcagattcattatcaaggctttcattcaggactttgaacttgagcctcactcacgaagtgctgagtgaggaagcagttttaagtgtggaaggcaggcagcaatttgagattcaatctggtctcccagatgagaagcctgtgccacctcccgcccatgcacagaggtctgttgcctcccagcaagagagccgccatccccaccaacgcgaccactcacaagacacagccccaccgaggggagcatcccgacatcaccccatgactcagcctcctgggactactagcctagcatgatgacgtggtgcatgaagtgcctgtatcaaggagagccttgggagc

SEQ ID NO: 38013 - DNA, 511 bp, Homo sapiens
  misc_feature (1)...(511): n = A,T,C or G
caatagaaatnnccgtctggangnncncnnnnnnaaattgatgaccttgtgaagngngcnggaattcacggcactgggctgctggctcacctgaagatgcctttggcatgtgcaacttctccaaaagtgcaaacgcctcccatcaaagtggaaattccatgggccaaaaacagattcacaaaacagttcacgctggaatgttcaatccagccttatttatttatttatcttcgtttttatttttttcagagccagagtatcactctgtcacccaggcttgactgcagtggcacggtcatagctcactgcagccctcaactcctgggctcaagtgatcctgcctcagcctcccaagtagctgggactgcaggtgcccaccatcatgcctagctaatatatttcgttgtagatacggagtcttcccatgttgctcaggctggtttcgatctcatgggctcaagtgattctcccacttcagctttccaaagtgctggttttacaggtgtgagcc

SEQ ID NO: 38014 - DNA, 493 bp, Homo sapiens
  misc_feature (1)...(493): n = A,T,C or G
gaggcncnnattgannccctttcgtagtccctagtcagnngggnggaattccccgtccaagccggtccacctcacagccttcctgggatacaaggctggcatgactcacatcgtgcgggaagtcgacaggccgggatccaaggtgaacaagaaggaggtggtggaggctgtgaccattgtagagacaccacccatggtggttgtgggcattgtgggctacgtggaaacccctcgaggcctccggaccttcaagactgtctttgctgagcacatcagtgatgaatgcaagaggcgtttctataagaattggcataaatctaagaagaaggcctttaccaagtactgcaagaaatggcaggatgaggatggcaagaagcagctggagaaggacttcagcagcatgaagaagtactgccaagtcatccgtgtcattgcccacacccagatgcgcctgcttcctctgcgccagaagaaggcccacctgatggagatn

SEQ ID NO: 38015 - DNA, 490 bp, Homo sapiens
  misc_feature (1)...(490): n = A,T,C or G
ggggccccattgagaccccatagaggccgtgaaaacaacncagagaggggtgcaagatcctgatttttcaggagttcaagcgacaatggcagcccaatacggcagtatgagcttcaaccccagcacaccaggggccaggtatgggcctggaaggcaagagcccagaaattcccaattgagaattgtgttagtgggtaaaaccggagcaggaaaaagtgcaacaggaaacagcatccttggccggaaagtgtttcattctggcactgcagcaaaatccattaccaagaagtgtgagaaacgcagcagctcatggaaggaaacagaacttgtcgtagttgacacaccaggcattttcgacacagaggtgcccaatgctgaaacgtccaaggagattattcgctgcattcttctgacctccccagggcctcatgctctgcttctggtggttccactgggccgttacactgaggaagagcacaaagccacagag

SEQ ID NO: 38016 - DNA, 489 bp, Homo sapiens
  misc_feature (1)...(489): n = A,T,C or G
ccactgaaaaccctcgcanggccgganngtgaagcacatgagaaggancgaancaactatttcgagataaaaaacattaaaggaacagttctttggcttggagttgatgcccttggactgaatatttatgagaaagatgataaggtggccccaaagattggctttccttggagtgaaatcaggaacatctctttcaatgacaaaaagtttgtcattaaacccatcgacaagaaggcacctgactttgtgttttatgccccacgtctgagaatcaacaagcggatcctgcagctctgcatgggcaaccatgagttgtatatgcgccgcaggaagcctgacaccatcgaggtgcagcagatgaaggcccaggcccgggaggagaagcatcagaagcagctggagcggcaacagctggaaacagagaagaaaaggagagaaaccgtggagagagagaaagagcagatgatgcgcgagaaggaggagttgatg

SEQ ID NO: 38017 - DNA, 506 bp, Homo sapiens
  misc_feature (1)...(506): n = A,T,C or G
agtggcgnncnnnnncgccccaattgagaccctaggcaaatgagngccatacgccgngcggagnaagcacgcagatgcgcagctggcattccacatggccttcctgcggcagtacaggcagacagtggccacctacgagtcctgtagcactgccgcattcaagcacggtcgcactgagaccatccgcccggcctccgtctatacaaagaggtgctctgaggcctttgtcagggagccctccaggcacagtgctggtgagcttcagcagatgatggttgagtgctccaagtaccatggccagctgaccaaagaagcagcaatggggagaaaaccaagccactggccccgttacacagcaagccagggctttgaccgacacttgtttgctctgcggcatctggcagcagccaaagggatcatcttgcctgagctctacctggaccctgcatacgggcagataaaccacaatgtcctgtccacgagcacactgagcagcccagcagtga

SEQ ID NO: 38018 - DNA, 491 bp, Homo sapiens
  misc_feature (1)...(491): n = A,T,C or G
gcggnatcganccatcgagatcactagtccatgtggtggaattcgccagggctgcagcctcatctgtttgcggatcagaacccgagctgtgcttgtggctgcggctgctaactggctgcgcacagggagctgtcaccatgcctcactcgtacccagccctttctgctgagcagaagaaggagttgtctgacattgccctgcggattgtagccccgggcaaaggcattctggctgcggatgagtctgtaggcagcatggccaagcggctgagccaaattggggtggaaaacacagaggagaaccgccggctgtaccgccaggtcctgttcagtgctgatgaccgtgtgaaaaagtgcattggaggcgtcattttcttccatgagaccctctaccagaaagatgataatggtgttcccttcgtccgaaccatccaggataagggcatcgtcgtgggcatcaaggttgacaagggtgtggtgcctctagctggg

SEQ ID NO: 38019 - DNA, 491 bp, Homo sapiens
  misc_feature (1)...(491): n = A,T,C or G
ntgggaatcgaganctagaccagcgtgcnggaatncgcggaggtttacaacatcattaagaaggagagtaaccggcagagggttggattggagctgattgcctcggagaatttcgccagccgagcagttttggaggccctaggctcttgcttaaataacaaatactctgaggggtacccgggccagagatactatggcgggactgagtttattgatgaactggagaccctctgtcagaagcgagccctgcaggcctataagctggacccacagtgctggggggtcaacgtccagccctactcaggctcccctgcaaactttgctgtgtacactgccctggtggaaccccatgggcgcatcatgggcctggaccttccggatgggggccacctgacccatgggttcatgacagacaagaagaaaatctctgccacgtccatcttctttgaatctatgccctacaaggtgaacccagatactggctacatcag

SEQ ID NO: 38020 - DNA, 470 bp, Homo sapiens
  misc_feature (1)...(470): n = A,T,C or G
cactgagaccnatggaagngcgtcggaattccacacaacacctgagctgttctgaataccttcaggttcctggcctccctgagcaagtgcagaaatttttaccttcaaggatcagggtttttctgtttgtttgttttttaacacacatatatgtgaacaaagagtatgcgtttgtactggcagaagaagcgtctggtaagacaaccagcaagttaacaatggtcacctccagaaatgggctgggtaaaccaaagaatttttttgtttttgttttttttgagtcagggtctagctctgtcacccaggctggaacgcactggtgtgatcacggctcactgcagccttgacctccctggctcaagcaatcctcccagctcagcctcctgagtcgttgggactacaggcacgtgccaccacgcctgacacattntttaaatttttgtagagacagtgtttcaccatgttgccca

SEQ ID NO: 38021 - DNA, 430 bp, Homo sapiens
  misc_feature (1)...(430): n = A,T,C or G
cccatgggggccattgacgtaagcgacctccgaccggtcccggacaatcaagaagttttctgccatcccgtgacggaccagagcctgatagtggaacttgtcgagctgcaggcccacgtacggggcgaagcggctgcgcggtaccactttgaggatgttggtggcgtgcagggggctagggctgtccatgtggagtctgttcagcctctcagtttggagaacctggccctgaggggccgctgtcaagaagcctgggtcctctctggcaagcagcagatagctaaggaaaaccagcaggtgagggcccgagagtgtgtaatgtcctggaagggcggtagcggngacgcaaagatccaggtaagcatcctgactctgatccccttaggtagcaaaggacgtgacacttcatcaggccttgctgaggctgccc

SEQ ID NO: 38022 - DNA, 493 bp, Homo sapiens
  misc_feature (1)...(493): n = A,T,C or G
agcgggaatggagacatagagagccntgnggaanncggagaccagngaaggaccaggcctggagagcacagggtcctacctgggcatccagcagaggagcccctaaaggccaggagcaccccaagaggagggagggcggccagcctccattgacggcgagcctccagccctctcctactttgatcaccatttctctccaggctttctgcctccgagatgtggcaccatagtgcggtgccctgtggcttcaccgccctacttccacctccgcccagcctgtaatgtttatataagcagcctcaaggaccaagaaccatctgcgaaaggacacacacaggaaattcataaaagaaatctgaatggataaaaccatgaaaaaaagtatgcttcattagtaattaaagaaaggcaaatagagctggaagcatttttcccttagcaaaccataacagaaaaaaataagacccaatattgggcaagagactactgaaaa

SEQ ID NO: 38023 - DNA, 488 bp, Homo sapiens
  misc_feature (1)...(488): n = A,T,C or G
agcgggaatcgagacctttgacagccncgcggaanncgcngcgggagagtgggcggagggtgtggggccccactccacagccccaggtttgctgctgcgctgtctgcttggagattaaaatgaaacgtgacttctaggtgagacgaatctgtgtgtctttgcattcctgagaccctcataaatcgattctgcagcttctccggtggatgagtcgtgcccagccacaccctagcaaaataccgtgggtcacacaccacctgcatttctgagttccggttaccatctcactctctctccacgttattttacgttttctgtaaatgaatatttcctctccctgcgtcaaggtcacacagtggtagaacaactgcgaccaccaacctatgttcagtgtacaacctcctgagacctgggaggatccccttgaactccgccttagacctatacattcagaaattcgggcggggagactcagacatctgcattgn

SEQ ID NO: 38024 - DNA, 496 bp, Homo sapiens
  misc_feature (1)...(496): n = A,T,C or G
cggccccctttganccctatcgagatccctgtccangtggtggaattcctccctggtttgggatgtacattccgttcctgcagctgaattgcgacctccgcaagacaagcctcttcaaccacatggcctccatggggccccgggaggcggtcagtggcctggcaaagagccgggactacctcctgacactgcgggagacgtggaagcagcacacaagacagctgtatggcccggacgccatgcccacccatgcctgctgcctgtcacccagcctcatccgcagtgaggtggagttcctcaagatggacttcaactggcgcatgaaggaagtgctcgtcagctccatgctgagcgcctactatgtggcctttgtgcctgtctggttcgtgaagaacacacattactatgacaagcgctggtcctgtgaactcttcctgctggtgtccatcagcacctccgtgatcctcatgcagcacctgctgcctgccagctactg

SEQ ID NO: 38025 - DNA, 495 bp, Homo sapiens
  misc_feature (1)...(495): n = A,T,C or G
gagccccatagatccccttgnannngtgatnancactactcagtgtggnggaattccttggaaaacacctgcaggacttccatctcaatggttttgaccacaatttctgtctgaagggatctaaagaaaagcatttttgtgcaagggtgcatcatgctgcaagcgggcgggtactagaagtatacaccacccagcccggggtccagttttacacgggcaacttcctggatggcacattaaagggcaagaatggagctgtctatcccaagcactccggtttctgcctggagactcagaactggcctgatgcagtcaatcagccccgcttccctcctgtgctgctgaggcctggtgaggagtatgaccacaccacctggttcaagttttctgtggcttaaggaagtgtgaagatatgatccagtccagggctaggctcagccacctgtctcctgtccagaaaaaaggtgaagattaagaagctttcagaatgattcn

SEQ ID NO: 38026 - DNA, 491 bp, Homo sapiens
  misc_feature (1)...(491): n = A,T,C or G
agagggaatgagacctttggacagcccgcggaannctgctattccattctcccatctactacctatctgttcttcaggccatccactcatccattcttctgtcccaggtacctagacacttgtcttcccatccgtttgttagttgatccactcctcattcagccctcccatgggcctggcatgtagccgagcaccctggagagggcagactaagaagacatggtccgtccctgcctgtgaggagttcaggtctctgaggaggaggaagcagtgaaactgggctttacacatggcctgagaacagcttaggcctgaacataaggaacagcttggagtggaggggacacagaggaaccctcactatcatgcatgccaacccaaccactgcctgccctttcccttctggatttagctcgtgtctccaggctcctagtcctgtaatccagggacccatcagcgagggattcanggaagcagaggcagctctccag

SEQ ID NO: 38027 - DNA, 494 bp, Homo sapiens
  misc_feature (1)...(494): n = A,T,C or G
gagggctcnaatcgagatcatangcagngttgtgaaatccctgactggctcagccttctgccccgtcaacctgatgaagcccctcttccccggcatgggcttcatcttccgtaactgcccctcaaacccgggatctccccttcccccggccagccccaggccaccacctcggaaggatccggaagcctccaaggcctccccactgccattcgagccatggcagcgcaccccaccatcagaagagcctgtgcttttccagagctccctgatggtctgagggtcccacccctgccccactttaccatagagaccagtgccttggtggcaggtccctccccaggtcccctgagatggggtatggaggggcccttccctctcggccttcgagcactttctttcacttactgtgtcaaagccctgggtcctctttttgatgggcaccggcccctctgaacgtgatgggacctgccttctccactagtagctgggcagct

SEQ ID NO: 38028 - DNA, 476 bp, Homo sapiens
  misc_feature (1)...(476): n = A,T,C or G
aaatagagaccattggccangngcnggaattcctgactccacagactcagtcatctcctctgagtcagggaacacctactaccgagtggtgctcatatgggagcagggggtgggcaagtccactctggccaacatctttgcaggtgtgcatgacagcatggacagcgactgcgaggtgctgggagaagatacatatgaacgaaccctgatggttgatggggaaagtgcaacgattatactcctggatatgtgggaaaataagggggaaaatgaatggctccatgaccactgcatgcaggtcggggacgcatacctgattgtctactcaatcacagaccgagcgagcttcgagaaggcatctgagctgcgaatccagctccgcagggcccggcagacagaggacattcccataattttggttggcaacaaaagtgacttattgcggtgccgagaagtgtctgtatcagaagggagag

SEQ ID NO: 38029 - DNA, 499 bp, Homo sapiens
  misc_feature (1)...(499): n = A,T,C or G
naaatagaataacccttgcgcagngngcnggaanncatagatcagcatctgcctaacatcagacgtaggctagagagctgtgagcccaggctcagccaatgcttatctgctctgcgcctccagcagggtggcagcactggaagcatcaggaaccctggctgctctctaccctgtggccttcagcagccacctcgtacccaagctcgctgaggagctgcgtgtaggggagtcaaatttgactaacggagatgagcccacccaatgctcccggcatctgtgctgtctgcaagccttgtcagctgtatcaacacatcccagcatcgtcaaggagacactgcctctgctgctgcagcatctctggcaagtgaacagagggaatatggttgcacaatccaccgacgttattgctgtctgtcagagcctcagacagatggcagaaaaatgtcagcaggaccctgagagttgctggtatttccaccagacagctataccttgcctg

SEQ ID NO: 38030 - DNA, 492 bp, Homo sapiens
  misc_feature (1)...(492): n = A,T,C or G
ntttgtatccctggnnagngttcgtagtcactagtccatgtggtggaattcgacctggtgctgacagtgctcattgccctggccgtgtacttcctgggccggctggtccctcgggggcgaggggctgcggaggcagcgacccggaaacagcgtatcactgagaccgagtcgccttatcaggagctccagggtcagaggtcggatgtctacagcgacctcaacacacagaggccgtattacaaatgagcccgaatcatgacagtcagcaacctgatacctggatccagccattcctgaagcccaccctgcacctcattccaactcctaccgcgatacagacccacagagtgccatccctgagagaccagaccgctccccaatactctcctaaaataaacatgaagcacannnnaaaaaaaaaaaaaaaaaaaaaaaaaaaaaaaaaaaaaaaaaaaaaaaaaaannaaaaannnggcctaaaaccgcgcgccc

SEQ ID NO: 38031 - DNA, 491 bp, Homo sapiens
  misc_feature (1)...(491): n = A,T,C or G
agggggccnnttagancccctaattgatatcntgcgaagnggcgggaattctaagcgagtcagattccagatcgcgctccagcccggactcggaattcctgccccgcgggtctgcattttcacagcggcagaccagggcggggtgatgggtgatcccagtcgtcgcagtgaactccgagccgacttgaaaacgcgcgcgggcgaccagcgcagccccctcctgagttacacaagcaacaagcgactgctctgggccgtttgtctttcttttccggacccagcagtggcgcctaaagtctgcgaggggaaaatcgcttgtgtgctgagcatgtgaacctacaaggcccagatcaacacctggttgggacagaagaacaccagggcagtgcacagctgggatttcagtctctggtgtcatctcctgggtccactggttccactgagggtggctacactctgcagccaggcggcctggattcaactccctgccc

SEQ ID NO: 38032 - DNA, 512 bp, Homo sapiens
  misc_feature (1)...(512): n = A,T,C or G
caatttgaatncccttcggganngggcgggnnnnnaactgagaacantgtgcagngngcnggaattcgcttcacgcactcagagaagttcaccttccatctggagccccaggcccaggccactcaggtgtcagatgtgccagccacctcccggcggcctgaacaggtcacgtgggcagctcaggaacaggagctcgagtcccttcgggagcagctggaaggagtgaaccgcagcattgaggaggttgaggccgacatgaagaccctgggcgtcagctttgtgcaggcagagtctgagtgccggcacagcaagctcagtacagcagagcgtgagcaggccctgcgcctgaagagccgcgcggtggagctgctgcccgatgggactgccaaccttgccaagctgcagcttgtggtggagaatagtgcccagcgggtcatccacttggcgggtcagtgggagaagcaccgggtcccactcctcgctgagtaccgccacctccgaaagctgcaggg

SEQ ID NO: 38033 - DNA, 486 bp, Homo sapiens
  misc_feature (1)...(486): n = A,T,C or G
agggtcccnattgagatcatatcagtggttggaaccgcctctccaattgaattctgtcagcttgggccattatgtatcaagatggggcttggagaggtcacagagctttccaaaaaggctggtggaaaattacactgaaaagggggcatttccatcttctgggtccttccctggtttttttgccaccaccaaagagattgttctgacaggttctgcccaattttggaaggtggttcagttattcggtgactgagtcaaatgagatcatctctcttagctgccttgtcagacacacaggaagaagaggagaccaccggagtcctgcccagggacagcctttctcacaccatagcagggagctggtgatcacggaggctgcctggagcctgtcagcaggctagagactgtgtggctcagcctccaggccccttggaagccttcgggctcagcttttttcagtccccaggaccaggcctcagaacacag

SEQ ID NO: 38034 - DNA, 443 bp, Homo sapiens
  misc_feature (1)...(443): n = A,T,C or G
cagattcgcagtggtcgcttcttctccttggatttgttaaggattccaagtaactcttatttggagagaagacgatctgcacttcgcattttggcattgacatttaattttagggtcctttatatagaagggagagtaggtaaactgatttttttttttaacagggagggtttgacaatctttggcagacttggagcaaaagattgaggtgcatttcatgcctccttttgagagtcttgctctgtcgcccaggctgtagtgcaggggcgcaatcttggctgcaacctcagcctcccaagtagctgggattacaaacataagccaccacgcccagccctcatacctnttttaaaagtcgacctgttttgcaaaaagtctgctgtttttgtactaaaggctttggaatttggcatttagctaggaatgcacattctttcacctct

SEQ ID NO: 38035 - DNA, 483 bp, Homo sapiens
  misc_feature (1)...(483): n = A,T,C or G
aactggtccctccganggcggganactgagaacgtctgaacnnccccnncngtagcctgatcagcgccgctccagccgggaagatggtgattgctggggctcgtgccctgcatccctgtcctcccagggcctgccccacaggtcgggccctctgtgagatccgtctttggcctcctccagaatggagctggccctctcctggggatgtgtaatggtccccctgcttacccgcaaaagacaagtctttacagaatcaaatgcaattttaaatctgagagctcgctttgagtgactgggttttgtgattgcctctgaagcctatgtatgccatggaggcactaacaaactctgaggtttccgaaatcagaagcgaaaaaatcagtgaataaaccatcatcttgccactaccccctcctgaagccacagcagggtttcaagttccaatcagaactgttggcaaggtgacatttccatgcataaatg

SEQ ID NO: 38036 - DNA, 505 bp, Homo sapiens
  misc_feature (1)...(505): n = A,T,C or G
cacctaggatatcccnctgcgcannnnncnnnnaaactgagatccctgtgcagngtgcnggaattcggggaccccatctgaggtcttggctgaggttggcatctcctgaagaacagagagcacggtgtccagagctggcccttcccccagcccacagccagctccgtgcccgagtgggcgtccccagcgagccttccctctctgccgcttgtccttgtgtctgggctgctccaagtccttgtgctgggcaccctggacacgtcctgctggtgagggacctcgggaaggtgacagtctgtgtgccttggggtggagaccaacctgaggatgtcctgggaaacgttctcctgatgaatttctccttgactggcctttaaagaacataagaattcccattgcccagcctcagtgcatttggcaaatgcttactttgcttcccagagtcaaagaattggcgaaggttcctatatggtaatctggccggcctgggagaaagactcacgan

SEQ ID NO: 38037 - DNA, 499 bp, Homo sapiens
  misc_feature (1)...(499): n = A,T,C or G
aacttgataccctcgcanngncnnnaaactgagtccntcgtcagcgncgcggaattcatggaaggctccagcaatctgcttcagtgccagggacaggcttgtggccgaggggcctaaatctttcagggctttttgcgcctgatcaccaagaggttggagaggtgggaggggcgcgggggaaacagctcaaaagaaatgccaggtaagagctcaatattatgaagtattaaaaatcaaccgctaaagcctagcgaatgtcccaaagcgagtccaggcggtcctggaatggaggggagaaaggctgaagtcgggggaaggcaaggctttggggtggaaggggtgcattacctccccacccccgctttgctttcagtcccagctgctcgagaagggagggcgctgggaaaggaaacagagcggaatcgcccacattagcctcgctcttcggtgacccggcgcctctgggcttgtgtgagcgggtcctttctaatgccaatga

SEQ ID NO: 38038 - DNA, 486 bp, Homo sapiens
  misc_feature (1)...(486): n = A,T,C or G
aactgaaccctgtgcagggcggaactgaagccntctgaagcagcgntngcagtcagccaagatcacgccactgtactccagcctggatgacacagcgagactccgtctcaaaataaataaataaaaataaagtcagaacacctggcttaataggcctcactgtgcagatgaggaaactgaggcccagggaggaagagcgatctgtggagatatttctagaacccctgcaagctgagccccagtgaaggagagaaggtccagtaggagcttgctaagctcaaaatcgaagaaaggttcagcaagactgtcagggtgacctcaaagcaatggcagccatcagaggagccccattgctattaggaggctcctattgccctccccttcagcctctgactttcacctgtgctacccaattctggttccttcactcccattcaaaaatggaccccagaaaagccttattttgtggagtacctagttcccttt

SEQ ID NO: 38039 - DNA, 493 bp, Homo sapiens
  misc_feature (1)...(493): n = A,T,C or G
gcgatccncattcgataccctaccnagngttgtggaatctcctcgagcgggaggtgagcatcctgcggcaggtgctgcaccacaatgtcatcacgctgcacgacgtctatgagaaccgcaccgacgtggtgctcatccttgagctagtgtctggaggagagctcttcgatttcctggcccagaaggagtcactgagtgaggaggaggccaccagcttcattaagcagatcctggatggggtgaactaccttcacacaaagaaaattgctcactttgatctcaagccagaaaacattatgttgttagacaagaatattcccattccacacatcaagctgattgactttggtctggctcacgaaatagaagatggagttgaatttaagaatatttttgggacgccggaatttgttgctccagaaattgtgaactacgagcccctgggtctggaggctgacatgtggagcataggcgtcatcacctacatcctctt

SEQ ID NO: 38040 - DNA, 492 bp, Homo sapiens
  misc_feature (1)...(492): n = A,T,C or G
ccccccccccccccccccccattgagaccctcgatgagagcctaggccgngcggggaattcgaaccatgtccaccagtatctggggtgggcacgtggtcggcgaccctcagcagcaggggctctgtctcccttcccaaagggcgagaaccacattggactgtcccggctcagaccgtctgtactcagagcgaccgatgccccctgggaccctcactgcctacgtctgttcatcacctgcccaccggagccgcatgctcttcctggaactgcccacgtctgcacagaacagaccaccatacgccagggctgattggtgggggcctgagacccccggctgcccattcatggctgcaccccaccatgtcaaacccaagaccagcccccagggccagaccaaggcatgtaggcctgggcaggtggctcgcggccactggcggagccagtctgtggatccaagagacagtccccacctgggcttcacggcatccttg

SEQ ID NO: 38041 - DNA, 505 bp, Homo sapiens
  misc_feature (1)...(505): n = A,T,C or G
agagtncccnnnncggnacggcccaatagagaccccttgatagtagagcactagtccagagcgggggaattcgctcgaccttctctgcacagcaggtccagcatcctttgaaacatgagttcttaccagcagaagcagacctttaccccaccacctcagcttcaacagcagcaggtgaaacaacccagccagcctccacctcaggaaatatttgttcccacaaccaaggagccatgccactcaaaggttccacaacctggaaacacaaagattccagagccaggctgtaccaaggtccctgagccaggctgtaccaaggtccctgagccaggttgtaccaaggtccctgagccaggatgtaccaaggtccctgagccaggttgtaccaaggtccctgagccaggctacaccaaggtccctgagccaggcagcatcaaggtccctgaccaaggcttcatcaagtttcctgagccaggtgccatcaaagttcctgagcaaggatacc

SEQ ID NO: 38042 - DNA, 495 bp, Homo sapiens
  misc_feature (1)...(495): n = A,T,C or G
agccccccttgatnccctnnnnnnnnttttgagaccctagtcagtgtggtggaattcaccagatcctggctgggagccccgaggcattctacgtgctcaatgctgatgtctgctccgacttccccttgagtgctatgttggaagcccaccgacgccagcgtcaccctttcttactccttggcactacggctaacaggacgcaatccctcaactacggctgcatcgttgagaatccacagacacacgaaggattgcactatgtggagaaacccagcacatttatcagtgacatcatcaactgcggcatctacctcttttctcctgaagccttgaagcctcttcaggatgtcttccagcgtaatcagcaggatgggcaattggaggactcaccacgcttggggccaggggcatgtaccatccgcctagagcaagaggagtattcagccctggcatggcacggccagatatacgtgcatctcactgatggtatctggn

SEQ ID NO: 38043 - DNA, 492 bp, Homo sapiens
  misc_feature (1)...(492): n = A,T,C or G
agaggccnnnnngcncccccactgaaaccantgatagagcgcggtaanncggcacngngagtcgaagcgagggtctgaagttcacgactactagaaggggaggggagtggaaaggctctcagtgaaaaaggtcttctcatagcctttctttgctaaggacattgtgactctccagagagcaacagtgatggctctagaatgtctaggaaaaagaagggcttaatgtcaggagtctgcttggggcacacaacactagaagatgtccttctgcacattgtttcatatcgagtatggaacccttcagatcaaagcttaccaataaattcagtatgtacaacagattaacgtacttgaaatgaggaagaatgagagttatctcaaccagccagcaccccctatccccattcccacactttccctcatgggaggctgtcgggagcacttcgaaaaccactggaaaggccgggcacggtggctcatgcctgtaatccc

SEQ ID NO: 38044 - DNA, 15 bp, Artificial Sequence
  Exemplary oligonucleotide primer used in sequence assembly process
  misc_feature (8)...(8): n=a, t, c, g or 1-(2-deoxy-D-ribfuranosyl)-3-nitropyrrole
cctttttntttttgg

SEQ ID NO: 38045 - DNA, 15 bp, Artificial Sequence
  Exemplary oligonucleotide primer used in sequence assembly process
  misc_feature (8)...(8): n=a, t, c, g or 1-(2-deoxy-D-ribfuranosyl)-3-nitropyrrole
ccaaaaanaaaaagg

SEQ ID NO: 38046 - DNA, 12 bp, Artificial Sequence
  Exemplary nucleotide hybridization sequence used in sequence assembly process
aaaaaatttttt

SEQ ID NO: 38047 - DNA, 12 bp, Artificial Sequence
  Exemplary nucleotide hybridization sequence used in sequence assembly process
aaaaatttttta

SEQ ID NO: 38048 - DNA, 11 bp, Artificial Sequence
  Exemplary nucleotide hybridization sequence used in sequence assembly process
aaaaatttttt

SEQ ID NO: 38049 - DNA, 12 bp, Artificial Sequence
  Exemplary nucleotide hybridization sequence used in sequence assembly process
aaaaattttttc

SEQ ID NO: 38050 - DNA, 12 bp, Artificial Sequence
  Exemplary nucleotide hybridization sequence used in sequence assembly process
aaaaattttttg

SEQ ID NO: 38051 - DNA, 12 bp, Artificial Sequence
  Exemplary nucleotide hybridization sequence used in sequence assembly process
taaaaatttttt

SEQ ID NO: 38052 - DNA, 12 bp, Artificial Sequence
  Exemplary nucleotide hybridization sequence used in sequence assembly process
caaaaatttttt

SEQ ID NO: 38053 - DNA, 12 bp, Artificial Sequence
  Exemplary nucleotide hybridization sequence used in sequence assembly process
gaaaaatttttt

SEQ ID NO: 38054 - DNA, 11 bp, Artificial Sequence
  Exemplary nucleotide hybridization sequence used in sequence assembly process
aaaaaattttt
